United States Patent Application Publication US 2004/0214272 A1 - sequence listing, part 62

SEQ ID NO: 366505 - protein, 104 aa, Zea mays
  Clone ID: MRT4577_97419C.1.pep
KPKKPIFPGIKKAFKSKSKGVFQFFGRFNKGASNQKFLKGRAKSLFKTKKPKWAKTGRNLVATPSNKGWPEVFFFFFFFFFFFFFFFFFFFFYLFYFLYLAIYP

SEQ ID NO: 366506 - protein, 57 aa, Zea mays
  unsure (1)..(57): unsure at all Xaa locations
  Clone ID: MRT4577_9741C.1.pep
DEKAGPLVEICARRTXAPXKARDAAXMPAXXGSTAAAAWSTXSRGARRRGSXPGEFR

SEQ ID NO: 366507 - protein, 115 aa, Zea mays
  unsure (1)..(115): unsure at all Xaa locations
  Clone ID: MRT4577_97420C.1.pep
SFFHFLPTTLQVHPIPQTPLGECISXIHMGQAGIQVGNACWELYWLQHGIQADGSDAXDKTIGGGDDXFNTFLSETGAGKHVPGACLXERERTGIDEVRTGTYRQLLHPEQLISG

SEQ ID NO: 366508 - protein, 168 aa, Zea mays
  Clone ID: MRT4577_97421C.1.pep
MVSMAAAAAAVGVLLPFPFYYVLWTHPQRWVDLCGRSADPCRRMAQVSHAIKALQLLALASVSSFSWPPPLYCPILLSVGQYLNFRVYQLLGESGTYYGVRFGKTIPWVTEFPFGYIKDPQYVGSMLSLVALLCWVPLQYVLLWCLGYVFMMWVEHKEDSASRAKVIS

SEQ ID NO: 366509 - protein, 77 aa, Zea mays
  Clone ID: MRT4577_97422C.1.pep
RTTARQPNVVLTRKFQRRGTLQGTADHKPPYRFVRNRTGLEQREETTTKEAPRTNKAGPYRRGRRSQFKVVSSRYIG

SEQ ID NO: 366510 - protein, 109 aa, Zea mays
  Clone ID: MRT4577_97423C.1.pep
KNPDERRDADSDVEMNDAKPLDDSGRRGSIQNLRMKKESAETEAVDQDVNSAAAEHSRGTGPVADGVGSSKQTFPNDTTPMSIDEPNVLKVEQQSPNKLQDQPTMHQKP

SEQ ID NO: 366511 - protein, 83 aa, Zea mays
  unsure (1)..(83): unsure at all Xaa locations
  Clone ID: MRT4577_97424C.1.pep
SFVICETILYVPFLLLNATVQTQQKKREKNIWRILQWRDAILVKSNQIISSPRTNPARAAPPRAQHQHQPPPPPFHGGGXGGG

SEQ ID NO: 366512 - protein, 49 aa, Zea mays
  Clone ID: MRT4577_97425C.1.pep
LAVSRESMYTASAQALLRLVVIKGTNSRQHCRIKRANSRITHYTHSLDK

SEQ ID NO: 366513 - protein, 77 aa, Zea mays
  Clone ID: MRT4577_97426C.1.pep
KVIFLTPTGSLIHFPKKIVSLVPNIISLIFWCVKSLLKTRTGRGECATGAQKKGPLPLRALKIIVSNSLFKTNFSND

SEQ ID NO: 366514 - protein, 100 aa, Zea mays
  unsure (1)..(100): unsure at all Xaa locations
  Clone ID: MRT4577_97427C.1.pep
MRVLLVTLTLLPMVXSATSTHTSGGXDVSSPASDHVLPPEHVPPAGDMPPTMHXLPSTVHLPPPRHLPAAVHVPPPNXSAAAPCHYATEPCSAEPNPQSH

SEQ ID NO: 366515 - protein, 65 aa, Zea mays
  Clone ID: MRT4577_97428C.1.pep
EILCQAQTLYKSWLLILGARIRRRQLMTCFFTPIQTWISNDSYASFGCYYHSWDHLCIHVNYLCC

SEQ ID NO: 366516 - protein, 134 aa, Zea mays
  unsure (1)..(134): unsure at all Xaa locations
  Clone ID: MRT4577_97429C.1.pep
RNLSEVTEGIVDRPMSVEASTITVPQPSDQSTLWITWWIVPQIGCNNRRVKVRTQCCSESGDAGDHGCCFRVAPRIGSTLSGNGVYDRSRVLAHRILDLERTGTGASSRCVVCSLIAAGVGGLFLQRGXFLCPR

SEQ ID NO: 366517 - protein, 62 aa, Zea mays
  Clone ID: MRT4577_9742C.1.pep
INPKIPDLASALHRHGSDPSPPHVPSWVCLSSSRSIFFIKSNTALGYRLRPQGSTMTAPKPS

SEQ ID NO: 366518 - protein, 46 aa, Zea mays
  Clone ID: MRT4577_97430C.1.pep
LLTGWKFCLDICMHMSNLSLLNDMKDKICVLTDVFKYHLDLHAILG

SEQ ID NO: 366519 - protein, 60 aa, Zea mays
  Clone ID: MRT4577_97431C.1.pep
TLIISFFNIRTFRRRFSTLEYWRLPVLTLTLTLINRRLVTINSLCRVTSRMSRTPRGFLY

SEQ ID NO: 366520 - protein, 210 aa, Zea mays
  Clone ID: MRT4577_97432C.1.pep
MESMLLRASRDFARAASKIASAGRWAAPVTAARSAPSDLRSRLSFHSGTGGNTPISTDAPPDEMSSPASFTPLPGKVKILPSDEDVESEEALWALYLRWCNTLNQKRDHDEMVRRFDVFKDTVRMVHRVNKAKLPYTLKVSEFADGKLQESMSPKVFDEFATHAKGGGSRPLANRRKEGDLIIETGEDVPEYPQVYFKFSESGDSIIPLE

SEQ ID NO: 366521 - protein, 75 aa, Zea mays
  Clone ID: MRT4577_97433C.1.pep
MVNGFSIYRDSFHIIIMTQRLGLDLPRVGLSVLQTAFLHLLVARNDMIPGAISHLKAPPNSAVEAKMQGKRPQDL

SEQ ID NO: 366522 - protein, 83 aa, Zea mays
  unsure (1)..(83): unsure at all Xaa locations
  Clone ID: MRT4577_97434C.1.pep
IPFLEHVGTRWRPDSRFLSNTNEHRCRFHDLLAPYIPSFPVLPIAPDFVEDANQTREKNGLVLGKIDSSRHSPAGXWSRQQLR

SEQ ID NO: 366523 - protein, 111 aa, Zea mays
  Clone ID: MRT4577_97435C.1.pep
REHRNLVQLLGFCEERGERILVFEFMPHGALHDHLHCSSSGNGGRSPLFASWEARLRVALDAARGVEYLHCYAVPGIIHRDVKPSNILLDGDWTAKVSDFGLSLASGSSAA

SEQ ID NO: 366524 - protein, 69 aa, Zea mays
  Clone ID: MRT4577_97436C.1.pep
DGGAPSLSQPVYSGGPAHVQSSRRSRTPGRLVSSEQSAAARRLVGTRGQSWGYLLSWWSGTQVVIHDPS

SEQ ID NO: 366525 - protein, 107 aa, Zea mays
  unsure (1)..(107): unsure at all Xaa locations
  Clone ID: MRT4577_97437C.1.pep
PXXRXXLVTGHPLHRVFGSAXXSHPLHHIGSLRGSYFLEXLARFVVPXRPYERCRRAGREKGAEEFPGDENELXXVLGXYETGXXANRAVGWRRRXRDHQEEEKPDG

SEQ ID NO: 366526 - protein, 46 aa, Zea mays
  Clone ID: MRT4577_97438C.1.pep
ESLILSKKYSRIHDAVIHVPAHAVLYVFRIQTCLAHDPWQGFTLAP

SEQ ID NO: 366527 - protein, 185 aa, Zea mays
  unsure (1)..(185): unsure at all Xaa locations
  Clone ID: MRT4577_97439C.1.pep
NLLLLGVVGALINAGEVFGLFPVGRLTYARDVLALESIKKSLQNIPEDWNGDPCMPXGWAWTGVTCDEGSKIRVISLNFSSMSLSGFLSPDIAKLTALTDISLAHNMLSGPIPNLSNLRNLQRLHLQENQLSGSVPETLGTINTLREIFLQYNNLTGTVPENLLNNTGLTYTFLPGNSFSPKPPH

SEQ ID NO: 366528 - protein, 49 aa, Zea mays
  Clone ID: MRT4577_9743C.1.pep
ENSGHLIVLNREHIHQAQVTMLRSLHNVARPFSVLVHFRTWSWINPQAL

SEQ ID NO: 366529 - protein, 76 aa, Zea mays
  Clone ID: MRT4577_97440C.1.pep
SINYEASVTPSSSESMKEILRIVYRHRRWPNHRPGPKYTEQQEEENVHADSHVCFRTVRQVHNNGEFPPPMSRLQI

SEQ ID NO: 366530 - protein, 63 aa, Zea mays
  Clone ID: MRT4577_97441C.1.pep
RGLKAALFRLDEDRDAGVTLIWLRAAAGCHTHDCMLHYSCETHVYVDPQGINYEGDYGSKADI

SEQ ID NO: 366531 - protein, 76 aa, Zea mays
  Clone ID: MRT4577_97442C.1.pep
VSKFIPEVIGKEIEKSTSSIFPLQNVFIRKVKILKAPKFDLGKLMEVHGDYKEDVGVKLERPVEGDEAMQEVAAAE

SEQ ID NO: 366532 - protein, 88 aa, Zea mays
  unsure (1)..(88): unsure at all Xaa locations
  Clone ID: MRT4577_97443C.1.pep
IEKSTSSIFPLQNVFIRKVKILKAPKFDLGKLMEVITTCMEIIYPDNIPVVILTRCFSXHGDYKEDVGVKLERPVEGDEAMQEVAAAE

SEQ ID NO: 366533 - protein, 269 aa, Zea mays
  unsure (1)..(269): unsure at all Xaa locations
  Clone ID: MRT4577_97444C.1.pep
GYLEAGRGTLRNLRIRLSKESTNPDYIIVGKNKEKYTAAVDSSSSSPSTPDMGSAPAVRRMKVKDISEYMINAAKENPQLVQKIHEVLLENGVMAPPDLFSEDSMEEPKDLIVYDTTLFQSKDEMKRRMNELGSREYTDRGHDPLLPHHPGHELQPKVAPHRAPLESLKPVXRVWAFTTXHDIRDIASPFVSQYEPSAPPQEASSQLTKQLPVTAAAVATAAVVASSMVAAAALSTNDVNFDVPVAAAATVTAAAVVATTAAVSKQYEH

SEQ ID NO: 366534 - protein, 93 aa, Zea mays
  Clone ID: MRT4577_97445C.1.pep
RPQNSRPASLSVAPFQGPSIAAPAIIASARAPSMEGAIPGTHPNPAILTLPRMPRTHLVQSLLPPHPLTRSTTTNLRTPTPPLSELPMATAGE

SEQ ID NO: 366535 - protein, 162 aa, Zea mays
  Clone ID: MRT4577_97446C.1.pep
TGPEGPGRPTRLVLRAARGAGRLQKKPPSTTQTTRGRPARRGEADGRTRRGQEGARTPGRTTARGPRQEHGPRNRRAETRSTGHRRRSKSSRHRRTNGPRPGSRRRNGTPHEEGIKGHLQGKEGNRRAATAPHQPQRTDNGRRSDWNTHPKKKHRKQQANGG

SEQ ID NO: 366536 - protein, 82 aa, Zea mays
  unsure (1)..(82): unsure at all Xaa locations
  Clone ID: MRT4577_97447C.1.pep
LWXRXRXXXXXKXLCPWCCSPXFLRXAPGXXPGXWARGSXSXXWSPLPCPPXPXCLLXRXAGXXPCLGXVSPPPAPVXCLLA

SEQ ID NO: 366537 - protein, 124 aa, Zea mays
  unsure (1)..(124): unsure at all Xaa locations
  Clone ID: MRT4577_97448C.1.pep
MANPRVFFRLTVXGGAPACRIEMELYANEVPKTEENFRALCTGEKVALKSVKPLHYKVSTFHRVIPQLMCQGADFTXRVNVTAPESIYRENSPDQKFXVPKHTDXAMLSIANXAPSTNXSQFFI

SEQ ID NO: 366538 - protein, 125 aa, Zea mays
  unsure (1)..(125): unsure at all Xaa locations
  Clone ID: MRT4577_97449C.1.pep
MGYGFCATGTMIFKSNLSSREIVEQLVHASYYSQIQNVVFMELTNEDSEICSSSYGYQAEALPTRLSFTWKVENFLSFKEIMESRKIFSKYFXAGCCELRIGXYESFDTICIYLVSDQSSGFDPD

SEQ ID NO: 366539 - protein, 164 aa, Zea mays
  unsure (1)..(164): unsure at all Xaa locations
  Clone ID: MRT4577_9744C.1.pep
MLSRAAAIRRGAAAAFSTVSEKPETGLYGXRRASXTAKGFRRFVDDAIHRSDELVARVARLPSSTEIVRTMDEISNTVCSVIDSAELCRNTHPDREFVDEADKASMRIYEHLQYLNTNTTLYNAVLKAEGDSVLLTEEARRAAXTLRIXFSKGGIHLPKGSMKM

SEQ ID NO: 366540 - protein, 95 aa, Zea mays
  unsure (1)..(95): unsure at all Xaa locations
  Clone ID: MRT4577_97450C.1.pep
MIIAYFVSKSAKDWGXREFVTLTSLFDQDAGFLLXDIVVFFAEVLILKATTTMQELTNEDSEXAVQVTDVRLKXPTRPSFTWXKLENFLSFKEDM

SEQ ID NO: 366541 - protein, 49 aa, Zea mays
  Clone ID: MRT4577_97451C.1.pep
SSRARTPSRPPSAAAAVPVPGPPPCSGAGSRSDRPLLQGRAPELLAGVS

SEQ ID NO: 366542 - protein, 77 aa, Zea mays
  Clone ID: MRT4577_97452C.1.pep
EVYCRPRHKRFLLDFGTCSFACLKRLKKRLVVFLIPVVTAFGIGVLSGSKAWKIKLSYLLLVISSRFNVERGLCCFP

SEQ ID NO: 366543 - protein, 53 aa, Zea mays
  unsure (1)..(53): unsure at all Xaa locations
  Clone ID: MRT4577_97453C.1.pep
NTSIRVVWNREFGVAFGFKRQNWKVGATGLFISCYGFWGYNGWRMCGNLLXRG

SEQ ID NO: 366544 - protein, 151 aa, Zea mays
  unsure (1)..(151): unsure at all Xaa locations
  Clone ID: MRT4577_97454C.1.pep
NQHRKHKRGPTXAAKXXXXRRRXGXXAXXXTATXXPQGXQXXIXXXXPPNPXPAXXXGXENPRGEPXRXQQAXTAGXXXXXPXXXQQPXAXXQQXXXGXXXAQNXRAQQXQQXGPANXXAXXQQQQXXPXNQXXAXNXXXKXQQQQXPXSQ

SEQ ID NO: 366545 - protein, 58 aa, Zea mays
  Clone ID: MRT4577_97455C.1.pep
DAWADAWVDEKKKKKKKKKKKKKKKKKKKKKKKKKKKKKKKGGAFLRIQSLFPVDSKL

SEQ ID NO: 366546 - protein, 162 aa, Zea mays
  Clone ID: MRT4577_97456C.1.pep
IIVRPSVNFCTQCLYNFKFLVTLHHLGNSVFMFPGYVLEKLFVFPGRVVIPDCFFSGSKKEKRGVFFFAGPSPREELFFFCRRSTRSELGWGCPRFLQLLGAWFKGWVFGCWAPGFQGFYFLARVQKVSYFCGLPLCKEKVENVGSPCVLYKKKKKLKTCLI

SEQ ID NO: 366547 - protein, 105 aa, Zea mays
  Clone ID: MRT4577_97457C.1.pep
TRMDLIPLNPIRSLCNQTRPNGFYFYASRDGRPFFFFFFFFFFFSGGPAESKQFFHQMAAQIKFKACSFYIGFISNSKGPQFQKSTGAFFFSKRVFEGVALQRLL

SEQ ID NO: 366548 - protein, 134 aa, Zea mays
  unsure (1)..(134): unsure at all Xaa locations
  Clone ID: MRT4577_97458C.1.pep
NSAHAEAGPSETAPESLVKESLPEKPSAPAPEAPSRGDLNFIIRHASGKQLSAEQVAETEHYAKELKYPXGSLVYGGDNDDDFVYCLPDGKEINVCREMMDNMGYSKLELDLSVMTKDQLANSQAYNSLKVCIL

SEQ ID NO: 366549 - protein, 89 aa, Zea mays
  Clone ID: MRT4577_97459C.1.pep
HNLPKSRRGATSSTYTGERKRKRAMTFPETPKTNFTTSSICSNLVSDSLALLLSACAYMEPSRLLVGRTRQNWTGSGLAFRSIEHARRR

SEQ ID NO: 366550 - protein, 97 aa, Zea mays
  Clone ID: MRT4577_9745C.1.pep
MGSSLHAPPDPDGGAFWPGAPNSIPCPGARCRAKAYYALWRPPRGPHVAVYPPFKGGPPQGKGGGPPCGMVPFMGGGLPPPCGLAPPSWGCGSLYGG

SEQ ID NO: 366551 - protein, 57 aa, Zea mays
  Clone ID: MRT4577_97460C.1.pep
RCVCSLMSISALWYFFVAPESLDSPYYFFIICDARSREKYSGRVEGGARFTVRPIVS

SEQ ID NO: 366552 - protein, 73 aa, Zea mays
  Clone ID: MRT4577_97461C.1.pep
FYLYFFFFFFFLFWGGVDPTTLYKQKRYCQSSIYKNFYNNTVWYFFLLGPHLKKGTPALSFKKLPPHGNFGGP

SEQ ID NO: 366553 - protein, 56 aa, Zea mays
  Clone ID: MRT4577_97462C.1.pep
TVSLGTLLEFAAFLWLRARQPDLKRPYRVPLSSLPALAAMCAVPSAFLAYVCTVDG

SEQ ID NO: 366554 - protein, 46 aa, Zea mays
  Clone ID: MRT4577_97463C.1.pep
ESSRLWKFNSAIASRGRTAPVDPYALRAARAMPTPPVVAPWWEEKT

SEQ ID NO: 366555 - protein, 195 aa, Zea mays
  unsure (1)..(195): unsure at all Xaa locations
  Clone ID: MRT4577_97464C.1.pep
MYSARKNIQKDNGLEPSECVDSADHHFFDLDNDNQQLKSXDLKELYMNQCYAMMPCYRRXNAVVIHDPXRLSRASSKIHATTHLXLEKKFXGMDVVIVGTRRIGRTPYKDAAGLCPRTRTLTDAHDGILXDVDYPGEIEKKRVXRXRLDESKIIKIFLDPXETNYTEYKLETCTAFYRTLXEKDAVCEYPMTANA

SEQ ID NO: 366556 - protein, 49 aa, Zea mays
  Clone ID: MRT4577_97465C.1.pep
IHDLTLCTIKKQDLHLRLHRSDYMLDTLSKSLLKIELNTIPSTYPGLGF

SEQ ID NO: 366557 - protein, 51 aa, Zea mays
  unsure (1)..(51): unsure at all Xaa locations
  Clone ID: MRT4577_97466C.1.pep
DGFFVQFEAPALRKICVVPSTKEKGRTLCSSPEALDIGXNEXLPRIFKEAG

SEQ ID NO: 366558 - protein, 104 aa, Zea mays
  unsure (1)..(104): unsure at all Xaa locations
  Clone ID: MRT4577_97467C.1.pep
VPKVCGSNIDYYFKWLQVKAMNAFWVNKVKHEGDLIAKHQRSFTXVTXILFVGCIISIIVVCLCHVYIQIIDAKVLWYPSNVTFGASYVSSQLHVMENLHDNRM

SEQ ID NO: 366559 - protein, 261 aa, Zea mays
  Clone ID: MRT4577_97468C.1.pep
MAEPEMEVAVATAAPAGQKREREEGGDPAAECGGEETEVEGAAAKKPKLEEAKEAEKGRVEETAEGKTQEANEEKAVEAEDKPVTEEANEKKAVEAEGKPVTQEANEEKAAEAEGKPVKLGPKEFASAIDMFNYFYALLHSWTPQLEFNKYEQMVLEDLLRKGHAEPAKKIGAGVEAFEIGNHPVWKSHCFFVRRTDGSVDDFSFRKCVDNILPLPEDFKIGNGKKSGGHQKDGGGGRAGGRRGGGRGGWRGGRGRGRRGG

SEQ ID NO: 366560 - protein, 161 aa, Zea mays
  Clone ID: MRT4577_97469C.1.pep
LSLLLSFASLSQPPEHAARPAHAPRPTPTTEPRAPSSKPPLLSALHRGPCASAIRPSQPCAEPSSRPLHDALSEPPLRSESKRRATVVCWFLCVNGNHCFRFSFLSLFLSLETDALTPFGGRRRLSLSLADFFSPLPLSIKGTAELSPILPTQAHPIPLAR

SEQ ID NO: 366561 - protein, 63 aa, Zea mays
  Clone ID: MRT4577_9746C.1.pep
ALMQVLKVISNSSCRTGVKVGLYSVGINKRHVYTKRELTHGQYHTKGIASKKPYYRHFTNHRG

SEQ ID NO: 366562 - protein, 47 aa, Zea mays
  unsure (1)..(47): unsure at all Xaa locations
  Clone ID: MRT4577_97470C.1.pep
DAAALPEWAHPEVQQLQALLLLLGQSSLSCSRXGVSITGVLVSVHCP

SEQ ID NO: 366563 - protein, 150 aa, Zea mays
  unsure (1)..(150): unsure at all Xaa locations
  Clone ID: MRT4577_97471C.1.pep
MEEASLAKQDGGGSGSNSNGEVDDDDELPQPVFDRILRRXAAAAGPPTASGVARXHVSDALKRXXRGGGAAARAPXPXPPRPPGTAXRGAPHGTLPAXGAPDKXGSRXGTAEXRXXWPVLWQXEXEKXKAKAQRKKCPAGHETENLALAT

SEQ ID NO: 366564 - protein, 44 aa, Zea mays
  Clone ID: MRT4577_97472C.1.pep
NNRSNLTMSSKSIGYPFLQTYFDRRVQMIRQQGGSCIRDMSCIQ

SEQ ID NO: 366565 - protein, 85 aa, Zea mays
  Clone ID: MRT4577_97473C.1.pep
LGSFFLSFFFFCRRRCRPQTRVGGCPHFLRKRRSPKRTKTWGGPFRGAKILFPQEGFFKKKHPPDFYNLLGFQNRGGEPLGGRKF

SEQ ID NO: 366566 - protein, 128 aa, Zea mays
  unsure (1)..(128): unsure at all Xaa locations
  Clone ID: MRT4577_97474C.1.pep
LLALLPSFSLFPLTFSFVPLPSFSHPPLLPPSPSPSPSPALFTPLALRPGARPGPSLPVPAPLFQFHPRGGVPLSLSLIAHTTLARCVGDRGEEGRELVAARLAWPARVACLRFXTXXTVGGAPRPLP

SEQ ID NO: 366567 - protein, 126 aa, Zea mays
  Clone ID: MRT4577_97475C.1.pep
TNSCSDHKLAEADYGACAEQQEDAAGADRDRGAPAAGYVRAQVHHLRTDCGASGHVHPLPHEEGQRDPARRAAPMARDAIAKYRASADRQAQLCWLKRLPTDVICVHLGTRRHHTSASEAAPKDAP

SEQ ID NO: 366568 - protein, 135 aa, Zea mays
  Clone ID: MRT4577_97476C.1.pep
IYIYIYKIYILKTQPIAPAPQQTTDKESSEFTKACRPRRNRNDEGAGWRVLSAWHPSAISSCGTRRTSSGEAGVRGRALEAPGQSSSPAGTPWGRGRRRRQLRRRRRRRCTLCSSTIPIPWRGGPNLARLFYGET

SEQ ID NO: 366569 - protein, 53 aa, Zea mays
  Clone ID: MRT4577_97477C.1.pep
RGPVAVMVRSSSLRSSRRCGVLVPYKYGHSISRVVLCNLSLFESDLPLAAGCY

SEQ ID NO: 366570 - protein, 126 aa, Zea mays
  Clone ID: MRT4577_97478C.1.pep
TKQLHAASIIHQLGECWHQQGAYPCRRVACPPVALHKRAPPEHLQECPAEPECKGPGRGHQRQEAIRWAPRLASWLRGPPYTRSLPFRSMWSMISREDRRLFVWSFPLLYTCVIIVRTISLTTDLV

SEQ ID NO: 366571 - protein, 101 aa, Zea mays
  unsure (1)..(101): unsure at all Xaa locations
  Clone ID: MRT4577_97479C.1.pep
LEHGQILLGLLGRQPRFFKVPIQLMAAVIWVLDGLANLFLGLQDLPEFGKIGRWYPSESDAVAGPVXGEYSVQNTSMYGKVPLERFIHRVIRKGMAWRKLG

SEQ ID NO: 366572 - protein, 146 aa, Zea mays
  Clone ID: MRT4577_9747C.1.pep
GKKNWKDTTTPLRLDRFSPLTFVELARPIHPKKKKPPPPALGARRRTHECPGAKMVRGSIQASWSPWVWVPVCSNSGSTGCLGASPFEYNVFQLGAQRKPEYPYSLAHPPNVAIASGPPPSFFYLQCCSVTEACPIFPANCCGFNP

SEQ ID NO: 366573 - protein, 95 aa, Zea mays
  Clone ID: MRT4577_97480C.1.pep
RPTGHSSSWFCSVSHCLSHLLAHLMLPKDALRTRRVTSYEARRDTGRSGGAPRGRAWTTRSARAPRGTAPPGTPQRRRRGLRVRPDGAGWLRERR

SEQ ID NO: 366574 - protein, 218 aa, Zea mays
  unsure (1)..(218): unsure at all Xaa locations
  Clone ID: MRT4577_97481C.1.pep
MGDSAAGAPEPSRFGRICVFCGSNPGNRAVYGDAALDLGKELVAKGIDLVYGGGSVGLMGLIXQTVLGGGCSVLGVIPRALMPLEISGASVGEVKVVSDMHERKAEMARQADAFIALPGGYGTMEELLEMITWSQLGIHDKPVGLLNVDGYYDPLLMLFDRGATEGFIKLDCRDIIVSAPTAHELLKKMEHYTRSHQEVAPRTSWEMSELGYGKASES

SEQ ID NO: 366575 - protein, 64 aa, Zea mays
  Clone ID: MRT4577_97482C.1.pep
WLNLQDPVIKPLRDLDSETLQATIPHIPLWVKSPDYERVSTYFLVLITLLIIPLIYSCYLMECP

SEQ ID NO: 366576 - protein, 97 aa, Zea mays
  Clone ID: MRT4577_97483C.1.pep
GGGGGPLPARISQPKKPGGRPIFKISTDHWGGPKRGPKKFQTWGGAKQKVTNKRFRISGESKTAGILSKGAPPGRESQDPPHGHKDQSWRGPIYIGA

SEQ ID NO: 366577 - protein, 91 aa, Zea mays
  Clone ID: MRT4577_97484C.1.pep
IQAFHPIPYGIKSINPINQCLFVYSIWIIFQNPHNYVCSFTPCGLNVKPKYQQKQINSTKFKRCREGRIKRCREGRIKRKRPQSSYFLLLM

SEQ ID NO: 366578 - protein, 213 aa, Zea mays
  Clone ID: MRT4577_97485C.1.pep
MLNPRSEIYPTIEYRPIQPSDLEALEKIHLALFPIRYEREFFLNVVSGNGIVSWGAVDTSRSDDRRDEIIGFVTTRMIAAKDSEIEDLFRYNSSRKDLTLVYILTLGVVDGYRNLGIASSLVREVVKYAASISNCRGVYLHVISYNQPAISFYKKMLFKLVRRLPMFYYIRGQHYDSYLFVYYVNGGRSPCSPLCPTIAIQYSCTRCRGAVGG

SEQ ID NO: 366579 - protein, 48 aa, Zea mays
  Clone ID: MRT4577_97486C.1.pep
FLTHNFPTCLQNYNFLLPHTFINIASYIKPNLYPIAPQQFHSNIPLNP

SEQ ID NO: 366580 - protein, 33 aa, Zea mays
  Clone ID: MRT4577_97487C.1.pep
RPTRLLTRGINVNYRNQSSLGTRLSIIEVVEIL

SEQ ID NO: 366581 - protein, 120 aa, Zea mays
  Clone ID: MRT4577_97488C.1.pep
VHGDDVDKGGTTLCSGVSLVIQVLLFLRELWEFLVLGSCQRYPFTCARGALSELLELVSGIGYRGNGSRCGQRLQGIHKEVGQACPLVQLSLVCLCSVHSSMGYSKHIGVGECVRVDPGR

SEQ ID NO: 366582 - protein, 40 aa, Zea mays
  Clone ID: MRT4577_97489C.1.pep
DWTECKILGRVLMLYGNGSHVLNITTQVVMCSMEGKVGVI

SEQ ID NO: 366583 - protein, 59 aa, Zea mays
  Clone ID: MRT4577_9748C.1.pep
RVNLKECDEFSSSVACGLICGDCIFTVYFFILLKFIFFFFSLFLLLIYLLLLIFIYLIL

SEQ ID NO: 366584 - protein, 63 aa, Zea mays
  Clone ID: MRT4577_97490C.1.pep
KTDPLNRRAFPWTRVALKVRARTHMCKRTYGYGPPLAPPRAFTLYNHSPAPPLKGDFFTRGFQ

SEQ ID NO: 366585 - protein, 69 aa, Zea mays
  Clone ID: MRT4577_97491C.1.pep
FSQTAGHDPHKGFGVIGGRYWILPCLTRNAMVNKCVAGRRTSKPDRQLALSCMRIEGNRSTTPRCWGTT

SEQ ID NO: 366586 - protein, 74 aa, Zea mays
  Clone ID: MRT4577_97492C.1.pep
PPAKKTKRGPDYRNPPFLEYPPPHHLFSLSLKLLLTKRKQFPRAGGGLIFGNHKITPPCGKKLNRGGVVCPETN

SEQ ID NO: 366587 - protein, 86 aa, Zea mays
  Clone ID: MRT4577_97493C.1.pep
RKHAHRVSNLFYLFCRPSTTALSLRLSSSPWRDWPYSCHGAPWRGGVLSPSIFPVTSKGWSRLHHGYEAAGWSAAAQMHMDTAMGR

SEQ ID NO: 366588 - protein, 108 aa, Zea mays
  unsure (1)..(108): unsure at all Xaa locations
  Clone ID: MRT4577_97494C.1.pep
IPIPQXXFXXXTNKIPXXFQXITFFTLXPSKFHXXXQKTKHIQYFXFSPXXFNSKIXXXXXXRTXXYXPSXILXXXXXXXXKKKXXPPPTXXXIXKKKNFLHPLFHLI

SEQ ID NO: 366589 - protein, 83 aa, Zea mays
  Clone ID: MRT4577_97495C.1.pep
RGGDLVLAFDVEDLWDHLLAQHGHDLQPEGGQLEKLVLDTLWILELFLSRQGAEFIVVARDPTGSSIRSTCGRMAMCKIPARP

SEQ ID NO: 366590 - protein, 139 aa, Zea mays
  Clone ID: MRT4577_97496C.1.pep
MSSSSSSSVVYEGWMIRYGRRKIGRSFVHTRYFVLEPRMLSYYKRKPQHKADKVGGKLPIKSLHIDGNCRVEDRGLKMHHGHMLYVLCVYNKREKHNRITMAAFNIQEALIWKEKIEMVIDQRQGVTLSDGKRPLAHRS

SEQ ID NO: 366591 - protein, 179 aa, Zea mays
  unsure (1)..(179): unsure at all Xaa locations
  Clone ID: MRT4577_97497C.1.pep
MSSSSSSWVVYEGWMIRYGRRKIGRSFVHTRYFVLEPRMLSYYKRKPQHKADKVGGKLPIKSLHIDGNCRVEDRGLKMHHGHVQLFSSLSSLFGVLLPFCYHNSAMTGSLGRXFVRALLLLLQMLYVLCVYNKREKHNRITMAAFNIQEALIWKEKIEMVIDQRQGVALSDGNKAFSTS

SEQ ID NO: 366592 - protein, 95 aa, Zea mays
  unsure (1)..(95): unsure at all Xaa locations
  Clone ID: MRT4577_97498C.1.pep
LPFKKFNSMGRVEMMDGGTKYGRIVIDLYAIDLNRTLVNAPALSTCQINFERLSLTDIXIDITLDRVMSTLINAMDEADLNTNCENRSFYKKLIV

SEQ ID NO: 366593 - protein, 100 aa, Zea mays
  Clone ID: MRT4577_97499C.1.pep
REERAGVPQPEGNADHERETRQGSESLLQRSRLVGGCQARHNASEHQEPWPCTVLAYIGPVVQATLNCASSRGGEESTEHAKAVQVRAAEPVVATVCHRC

SEQ ID NO: 366594 - protein, 89 aa, Zea mays
  Clone ID: MRT4577_9749C.1.pep
PQRHERQHGPSRLHPRQVRRLRRIHHQHVHRVIQAQVSYPDQANNPADRARTPRALHESSSQGRNNIKLSVSPGPACTSPRSIYIYTGR

SEQ ID NO: 366595 - protein, 38 aa, Zea mays
  Clone ID: MRT4577_974C.1.pep
IPILFDVYSILVVSYEFFILFPFCRQKNPSHCFEFVVN

SEQ ID NO: 366596 - protein, 140 aa, Zea mays
  Clone ID: MRT4577_97500C.1.pep
MGGTLPSLPDWNRTLLLLVGCQRGGRDEGAMAQILLHGTLHGGGVEAVPLSNPHRAPGGAPQFIRRLAEGIVAPAGVGAGATPISATGALVMARAAWPRLPPHVPVDPRAAPCLPPCCAPLPRRRSPPPAGPAAACAAPP

SEQ ID NO: 366597 - protein, 93 aa, Zea mays
  Clone ID: MRT4577_97501C.1.pep
MRTCRLVLLSYCLLHSRIMIMLSAKGCCVGDCDVHLRCIICSVLWRQHDCCLGFLFGHVLLLLRSTLSDPDTDTSHSFGGSDRTPLLRQLPRV

SEQ ID NO: 366598 - protein, 506 aa, Zea mays
  Clone ID: MRT4577_97502C.1.pep
MAPTEESVADTPAPPPPPPHFVIVPLVAQGHTIPMVDLALLLAERGARASLVTTPLNGARLRGVAEQAARAKLLLEIVELPFPTDVDDLPPGIENMDQVTDNGHFVPLFDALQKLAGPLEAYLRAQAPRPSCIVSDWCNPWAAGAARSLGIRRLFFHGPPCFYSLCDLNATDHGLRELAAGAAAADVDDGGQERFVVPGMPVHVEVTKATAPGFFNSPGWEALRGECVEAMRAADGAVVNTFVGLEGQFVSCYEAALGKPVWTLGPLCLRSRDADAMSSRGADGGQQHSAVAAWLDSKETGSVVFVSFGSLARKLPKQLFEVGHGLEDSGRPFLWVVKQAEASPPEVREWLGALEARAAGRGLVVRGWAPQLAILSHRAVGGFVTHCGWNSLLESVAHGVPVVTWPHFADQFLNERLAVDVLGVGVPIGVTAPVMVFDDESVAVARGDVARAVSALMGQGEEAGERRRRAREYGEKAHGAMEKGGSSYENLTQLIESFGQVEARKG

SEQ ID NO: 366599 - protein, 79 aa, Zea mays
  Clone ID: MRT4577_97503C.1.pep
PTESFFFLGKHILYENCTLLYQSITLLLFSIHLSKLHIRLTHGNATWRNHKPTFSILLYTEFKKLIFRFTLQTTFHHKL

SEQ ID NO: 366600 - protein, 97 aa, Zea mays
  unsure (1)..(97): unsure at all Xaa locations
  Clone ID: MRT4577_97504C.1.pep
WASCETKDRSSREAGTNKTDVVCGPQDRLRALVVIRIIFGILFAILLVLIFIKKVAKKPTNKASDPEQEPQEINFPDXLPGXNTAAPVQETIAGCYR

SEQ ID NO: 366601 - protein, 105 aa, Zea mays
  unsure (1)..(105): unsure at all Xaa locations
  Clone ID: MRT4577_97505C.1.pep
FFLTPLKLKCAKELGIPTAIYRLGXGAASTNESDTSLSLPFTKLPFLLRLLLLLATSXMITDYKHNSXRSSYXINHLFYLLVDRIPHXPHDTTLCLYLTCNLTHY

SEQ ID NO: 366602 - protein, 62 aa, Zea mays
  Clone ID: MRT4577_97506C.1.pep
MGSSAALQPKQLYQLVVNNFVAVVAAPLAVAAVVNAARVGPDELLGRLQALRAVHVFLAVFV

SEQ ID NO: 366603 - protein, 174 aa, Zea mays
  Clone ID: MRT4577_97507C.1.pep
AVVAYNTVMSRLCDMGRWPAVLELLADMIKKCIIPNTRTLNIFIHSLCIADKLSVAMKLVCNQGFPANAVTYNTLIHSFYLRGEAYEADNMFAYMTEVANIAPDEVTYTIMVDGLCRQGKFDKATDFFKESLRNRLRLSKDLLTALLNGLARSDRNTNILVVFQEIERQGFVRC

SEQ ID NO: 366604 - protein, 66 aa, Zea mays
  Clone ID: MRT4577_97508C.1.pep
LHLCALEWIGMEFSFKFHINPRYNNTCMYKEYIQTDPHMECLRYAFKCIPPHPGPSRHHRFRLLHV

SEQ ID NO: 366605 - protein, 728 aa, Zea mays
  unsure (1)..(728): unsure at all Xaa locations
  Clone ID: MRT4577_97509C.1.pep
FAPQNDTLEEAQLSMDQEILLEMKLGGGSSGFSARSTNDELALXPLEPSTSSFSIAGGPTFSNGFSSGIGHSFVTDNSFSPLLQDEIIMGVCLSNGTKDDTHGLSGLHNLGNTCFMNSAIQSLVHTPPLVQYFLEDYTCEINKENPLGLQGELAIAFGELLRKLWSSGRTSIAPRAFKSKLSRFAPQFSGYNQHDSQELLAFLLDGLHEDLNRVKEKPYIEAKDADGRPDDEFAEECWNYHKARNDSIIVDKFQGQYKSTLVCPVCNKISVTFDPFMYLSLPLPSTVTRMITVTVFSGTGDVLPMPYTVTVQKNGNCRDLTKALADVCCLKNSETLLLAEVYERRIYRYLTNPIEGLHIIKDEDILVAYRLPVGHEKLLRLEILHSRADRFPVEPQFNINRKLIGCPIVTCIPNDSTAKSDIYAAVSSVLVPFVRAKAHSPDVSAVKLNGNGPSLDGIVLTDNGTTSEEGLSTSRSREDDNAADNELLPFQLSLTDEKGSTRNAIDMDSNRVLGLVIRVLMDWGEKEHGMYNIDHMDVLPEVFKPGFMSKKTRQEAVNLFSCLDAFLKEEPLGPDDMWYCPGCKEHRQASKKLDLWRLPEILVVHLKRFSYSRYMKNKLDTFVNFPIHDLNMSKYVKPTSRGDQHPVYELYAVINHYGGLGGGHYSAYAKLVEEDNWYHFDDSHVSSVNEDEIRRSAAYVLFYRRVGGSSTAANGGPVDIEMVDSLET

SEQ ID NO: 366606 - protein, 87 aa, Zea mays
  Clone ID: MRT4577_9750C.1.pep
KGLSWKQLRECQGLSAQASVMGEAWIRARGRGYQDGKFKSAQGAASKEPRPVPISHRGRRHLWLSRSRDGSKVFYQGPAGNNFLPPE

SEQ ID NO: 366607 - protein, 83 aa, Zea mays
  unsure (1)..(83): unsure at all Xaa locations
  Clone ID: MRT4577_97510C.1.pep
ARLLQKMRFTPPXSLSPKXSHRLLRALADSQNKNRVKMQKWFEPKDPDKAKMQKERVSKSLSLQYLVYDTQDAHVLLVTKIAA

SEQ ID NO: 366608 - protein, 27 aa, Zea mays
  Clone ID: MRT4577_97511C.1.pep
SNILKIIASNNMNNHGALLIAYIYQKF

SEQ ID NO: 366609 - protein, 140 aa, Zea mays
  Clone ID: MRT4577_97512C.1.pep
PISTSATHVHMAVAAFRALNCSIYNDGLVFVPNLGPLFSESGGAIRSCPYFHVITVMLIKVIHVCSQRIAAFSVSGPTVVRAANQKDKSTTAHRGACEERNASAPPAHHTSQGKSQNQRESSTGSGGSDSRRPGWRRRRR

SEQ ID NO: 366610 - protein, 85 aa, Zea mays
  unsure (1)..(85): unsure at all Xaa locations
  Clone ID: MRT4577_97513C.1.pep
RSNFPVAHASGKEYLLAVGLFRLATLKSRQLADRCLEIQPDWRQAXSLKKAIEDKIAKDGVIGIGIAATAVGLLVGGIAALARKK

SEQ ID NO: 366611 - protein, 287 aa, Zea mays
  unsure (1)..(287): unsure at all Xaa locations
  Clone ID: MRT4577_97514C.1.pep
FAALTTVGPLTEKAGRSRVFAPSSRRKRKTTPPLAAVVPRRPPPTKSVDPDMDHLDEHDSDDMNVGVASDGPSRLRKKRSKVWDDYKPIIVDGAIQSAECRYCHIHMSCRGADGQSNGTSHLWRHQKICRAKDGIFPNPLQQDAYLPYVVNEVDPLDQILPDSLDEINLVTQSENSKFRSKVWKDFIPFYVRGRVQGADCVHCHKRFSADKGRSHLNRHTQTCPARSGNSLNHQKGVLYQSSLPSSKSSFQDELSPALTNGKVQIAEYASKFLKTAEAMQALWNIMX

SEQ ID NO: 366612 - protein, 156 aa, Zea mays
  unsure (1)..(156): unsure at all Xaa locations
  Clone ID: MRT4577_97515C.1.pep
GIWPEAPPPNQKFPPPFVFPPKNFGGPKGGKGFGKGGGKGPPKVLGAPPPGVPKPPFPRFARRGGVKPLSGVFFKGTPGGVKIFFGKVFPGPVPFPEAGRRKTLPPLGVVFRLXARGPPLSGLGGWAPPPRFSVPAVLGFFPFPNCFCGGEKFFFF

SEQ ID NO: 366613 - protein, 51 aa, Zea mays
  Clone ID: MRT4577_97517C.1.pep
RFGQGLRLKNLKMVRVGGRKLGSASAGSQGCMPNSKEIFLFLINFFIFYLF

SEQ ID NO: 366614 - protein, 70 aa, Zea mays
  Clone ID: MRT4577_97518C.1.pep
CSGRGCFFLHGGVFAGIYKFCCPWIFVCPGCFLHITCVLAVRSPVLASGPTVILPLSSIVNNKYTIKLYV

SEQ ID NO: 366615 - protein, 52 aa, Zea mays
  Clone ID: MRT4577_97519C.1.pep
QAVLAAVVSQDDTAIGKFHYINHTRSMELAESVTTYINRGMLYTPFSRASVP

SEQ ID NO: 366616 - protein, 57 aa, Zea mays
  Clone ID: MRT4577_9751C.1.pep
LLVTIFHKDSTVTGPPPITYINLYKWAEDVFVNVLLQDLLRIKILFGPFVMLGLSSP

SEQ ID NO: 366617 - protein, 134 aa, Zea mays
  Clone ID: MRT4577_97520C.1.pep
ISILYQLPHILSFFSHFFIPTHMHAAPWRAGRCACGGERSNRERRFTANGDCMLEVRESLPYRRERDAVPRCRAFYCKRRLHPRFQFVSADSLSIIRYNIGFEQDGGTDRSYTDHLRLLDAAAAFDGEGHRRLP

SEQ ID NO: 366618 - protein, 77 aa, Zea mays
  Clone ID: MRT4577_97521C.1.pep
RTVELRLERMLTFNPLQRITVAEALAHPYLERLHDVDDEPVCTEPFSFDFERQALTEDQMKQLIFNEAIELNPSFRY

SEQ ID NO: 366619 - protein, 67 aa, Zea mays
  Clone ID: MRT4577_97522C.1.pep
AHYGGGAIQKKKGRLTYVQLEHKPSEIAISRPEKRNNRPEEDTNPPLGAKKRKRPRGHGGEGQPKIG

SEQ ID NO: 366620 - protein, 78 aa, Zea mays
  Clone ID: MRT4577_97523C.1.pep
RAEDRGQKNPRCQKAQTWFPQKKVNVRLHLYSCFGLWGVYLQCHNYGGVRFCSPLGPEVFFVTPRPLSEVLSKYSSVT

SEQ ID NO: 366621 - protein, 88 aa, Zea mays
  Clone ID: MRT4577_97524C.1.pep
RPGQEMTEGEIELRRGGGTERDPAIHEINRLRDWNGAYPERREDELVEASNNAHNNDIKGGLIFKKLATLRQWLQEYSGNRKKGKGEN

SEQ ID NO: 366622 - protein, 148 aa, Zea mays
  unsure (1)..(148): unsure at all Xaa locations
  Clone ID: MRT4577_97525C.1.pep
YRPPAPGQHPPPPRPRPAPPPPPPPPPPAPPPPXPPPPQAPPPRAAPQRAGPPRRPAAPHARPPARRATGXPMSPPAEPLVKPHPAAGKSHDQPGXPPPPDRRAAXKPAPAXPVKGPLRFVSMPPXXDVSLPRYRAPPPHKRLLLSSD

SEQ ID NO: 366623 - protein, 121 aa, Zea mays
  Clone ID: MRT4577_97526C.1.pep
MAHPMYGSGPLRSRNAANSDEIQLRIDPVHGDLDEEIDGLQSRVRMLKGVAQEINSEAKSQNDFLHELQMTLAKAQAGVKNNMRRLNKSIIQQGSNHVLHVVLFALFCFFIVYLLSKFSRR

SEQ ID NO: 366624 - protein, 53 aa, Zea mays
  Clone ID: MRT4577_97527C.1.pep
YGLWTRSAWPCNLVELTGSILTLPGSSLDIVFASALEARLEYSMSSYASVDPA

SEQ ID NO: 366625 - protein, 121 aa, Zea mays
  Clone ID: MRT4577_97528C.1.pep
MAHPMYGSGPLRSRNAASSDEIQLRIDPVHGDLDEEIDGLHSRVRMLKGVAQEINSEAKFQNDFLHELQMTLAKAQAGVKNNMRRLNKSIIQQGSNHVLYVVLFALFCFFIVYLLSKFSRR

SEQ ID NO: 366626 - protein, 61 aa, Zea mays
  Clone ID: MRT4577_97529C.1.pep
KIKNRACSHFFFFAFKTKYLLYSSNNSTPLSSLQPTKGMTTRKTKRKKTCLKRHCQHGFHI

SEQ ID NO: 366627 - protein, 90 aa, Zea mays
  unsure (1)..(90): unsure at all Xaa locations
  Clone ID: MRT4577_9752C.1.pep
CLSLWPLWGHGFFVVWWLYCRFRWHSRLWFRVECVALFFCSVCPCRGVWLFSLPCGYALSLCLFFKVPLLWFFASFPXLLGGRSVGLAPP

SEQ ID NO: 366628 - protein, 137 aa, Zea mays
  unsure (1)..(137): unsure at all Xaa locations
  Clone ID: MRT4577_97530C.1.pep
MAHPMYGSGPLRSRNAANSDEIQLRIDPVHGDLDEEIDGLQSRVRMLKXGFVLFKALLLQALLYXVAQEINSEAKSQNDFLHELQMTLAKAQAGVKNNMRRLNKSIIQQGSNHVLHVVLFALFCFFIVYLLSKFSRR

SEQ ID NO: 366629 - protein, 69 aa, Zea mays
  Clone ID: MRT4577_97531C.1.pep
FQNCSPLPELFIIVHPAHWVKPLLSSGTYHTCTTYIYLFIPYLFTRRTGLTPATSSTYHTCYSHNTQIC

SEQ ID NO: 366630 - protein, 121 aa, Zea mays
  Clone ID: MRT4577_97532C.1.pep
MAHPMYGSGPLRSRNAANSDEIQLRIDPVHGDLDEEIDGLHSRVRMLKGVAQEINSEAKFQNDFLHELQMTLAKAQAGVKNNMRRLNKSIIQQGSNHVLYVVLFALFCFFIVYLLSKFSRR

SEQ ID NO: 366631 - protein, 121 aa, Zea mays; identical to SEQ ID NO: 366625
  Clone ID: MRT4577_97533C.1.pep

SEQ ID NO: 366632 - protein, 64 aa, Zea mays
  Clone ID: MRT4577_97534C.1.pep
GPRKGRNAKTADISKDTVQATGNYAAIKRLFAIDLKSSTGIPMNPRDRNPPPGAKDSMAYAPPR

SEQ ID NO: 366633 - protein, 34 aa, Zea mays
  Clone ID: MRT4577_97535C.1.pep
ARTTYYTTHNVTDTLDSGLVLRCSDRVHIFYGTF

SEQ ID NO: 366634 - protein, 35 aa, Zea mays
  Clone ID: MRT4577_97536C.1.pep
LPYSFINNNNNNNNNNNNNNNNNNNNNNNNLKLKT

SEQ ID NO: 366635 - protein, 89 aa, Zea mays
  Clone ID: MRT4577_97537C.1.pep
PQSSPPTSPPFLAPVIRLLSLVASARRRPAASAGRPMFFVSLAVPMWGVGRPHSFFLVDAGASHQVNMYRHVVFFILHWAAIHHPRGRA

SEQ ID NO: 366636 - protein, 101 aa, Zea mays
  unsure (1)..(101): unsure at all Xaa locations
  Clone ID: MRT4577_97538C.1.pep
ARRRRTSVLVVWXDAYVLHWSSWXKXRXPVLAEAAGGAPLLVLDRQGYSRCXXXXXXTSLCGMPPGVTHXLLLCSRSPSGKPAASRPVQQQNASGSRIYST

SEQ ID NO: 366637 - protein, 114 aa, Zea mays
  unsure (1)..(114): unsure at all Xaa locations
  Clone ID: MRT4577_97539C.1.pep
RHMYGMNSHQTGISXTPAAKIRTPHTWIRTSGXPSVPGPIKKIQGXIAHMTPAELQKRLRGLRTIPTGNSPYGGEISGTVDGHGMIPDFLDEQHIIVKKVVELQKTLDEASSRQ

SEQ ID NO: 366638 - protein, 234 aa, Zea mays
  Clone ID: MRT4577_9753C.1.pep
STPPSKVQLSINSLSYAAWCPFSSNFRPIFETVSTMYPQVHHFAVEESSATPSLFSRYGVRGFPAILLVNETTMVRYRGSKDLSSLVEFYKETTGLDPVAYIDVVVQQESTASLRSVAPWDRSPLEMAKDEPPYLLVAVVFIILKAAARLVPAAMSHLRAFLAVRVQNLNLGIRRGSNQVLERALNVLDVRRLCSKLGLSNRATDLRKGASNARAWASSFASVSLGEPSSSRQA

SEQ ID NO: 366639 - protein, 64 aa, Zea mays
  Clone ID: MRT4577_97540C.1.pep
GRHVSMYRLTKSVRGFFWNKATDISRIASENGSVYTKPNLRREVRRYSFSAHMLRKRRRHVRPA

SEQ ID NO: 366640 - protein, 38 aa, Zea mays
  Clone ID: MRT4577_97541C.1.pep
NYNQSKRVTFHNVSSQKLVKPYSSQYANKPFINKARAE

SEQ ID NO: 366641 - protein, 94 aa, Zea mays
  unsure (1)..(94): unsure at all Xaa locations
  Clone ID: MRT4577_97542C.1.pep
NSQTSSFLLAPVTFFTEGVRATLTLLQSAGLNEHHVLTRCLFACLFFHAYHLMTHTTLPIVXPVTHSVVTCLKHPGFIVTSQLLFKTPCCIIYS

SEQ ID NO: 366642 - protein, 53 aa, Zea mays
  Clone ID: MRT4577_97543C.1.pep
QWYQKFTNVDDVIPISAKFGHGVDDIKEWILSKLPLGPAYYPKVLADHSYIFI

SEQ ID NO: 366643 - protein, 47 aa, Zea mays
  Clone ID: MRT4577_97544C.1.pep
NHTVSVKSQNEQRKRKRLRLRVWEKKKLYSFHYQLQTRNIEMAHTKR

SEQ ID NO: 366644 - protein, 251 aa, Zea mays
  Clone ID: MRT4577_97545C.1.pep
MSEHELGGLYADEMLSKEDVETMNNLHNDDEELPESPTAGNDDREEASEADGADSVSGSGSDRVYTIDKVHQGAAMPIARVVDKYQGEAVEPDIKKLYMRLEALEADRESMRQALVAMRTEKAQLVLLREIAQQLAKDGVPVGPGAGAGPGVHHLPRKHTVGIVERRFTEDKKAILVKTFSMAALFKWILALLGKKKKLSQSRYTFGLTNNNVGLLILLDKCPRIQKTLTRTKLNLAERSSSSSSLYNVNR

SEQ ID NO: 366645 - protein, 49 aa, Zea mays
  Clone ID: MRT4577_97546C.1.pep
WTRGLSRTRGRSVDGGSTRRTLRRRPPKMDLLEDDDEFLGVRRSTKNWD

SEQ ID NO: 366646 - protein, 67 aa, Zea mays
  Clone ID: MRT4577_97547C.1.pep
ESNSWLARVYQVQSYTATFLKPNTRGLRNCPFTNVLRYVICIQQLILADCTALCYVVSQEKLCSVAC

SEQ ID NO: 366647 - protein, 176 aa, Zea mays
  Clone ID: MRT4577_97548C.1.pep
MAGPTTTLLLLLLCSAGLASGATAADDSGFTTFKVYFHDIVAGTSPTAIRIAQGAASNTSSTSFGAMVAIDDPLTTGPTRAAGTEVGRAQGTYTFADQQTFGLLMVMDFVFTAGEHKGSTLSILGRNEVLSDVREMSIVGGSGKFRMARGYVQAHTIDSGFKSGETVVQYTVNVRA

SEQ ID NO: 366648 - protein, 274 aa, Zea mays
  unsure (1)..(274): unsure at all Xaa locations
  Clone ID: MRT4577_97549C.1.pep
PCDVTPLIPRGSRGLLSTPAAGRPHSAVPRPAMRIFVLSGQSNMAGRGGVHHKHWDGVVPPECAPDPSILRLSSAQQWEEAREPLHADIDTTKTCGIGPGMAFARAVLSSLQEDTPGAAAQIGLVPCAVGGTAIREWSLGKHLYEQMVSRARXSRPCXGEIEAILWYQGESDAESDADTSAYLENVERLICNVRADLGMPQLPFIQVALASGNKRNIEKVRNAQFSVNLPNVVTVDPMGMALNEDKLHLTTESQVKLGKMLAEAYILNFSTSTC

SEQ ID NO: 366649 - protein, 93 aa, Zea mays
  Clone ID: MRT4577_9754C.1.pep
MHFALKVTLVLVCAVYLAHSYDGGHSSTYRKPDENGHYSFGYHIKDKKSATNFRKESGDGWGNKKSSYGLHDKNGRMRVVHYVADKHGFRAVI

SEQ ID NO: 366650 - protein, 72 aa, Zea mays
  Clone ID: MRT4577_97550C.1.pep
PPRRCTLGRTMMYDRGGHDHSNEARPGVGGDLACYGRDVYRCELVVCRRNRESGGREQKRTSDADEVWDEQP

SEQ ID NO: 366651 - protein, 247 aa, Zea mays
  unsure (1)..(247): unsure at all Xaa locations
  Clone ID: MRT4577_97551C.1.pep
GRGGVHHKHWDGVVPPECAPDPSILRLSLAQQWEEAREPLHADIDTTKTCGIGPGMAFARAVLSSLQEDTPGAAAQIGLVPCAVGGTAIREWSLGKHLYEQMVSRARXSRPCXGEIEAILWYQGESDAESDADTSAYLENVERLICNVRADLGMPQLPFIQXYEGSSKVERHEATILEKVALASGNKRNIEKVRNAQFSVNLPNVVTVDPMGMALNEDKLHLTPESQVKLGKMLAEGYILNFSTSTC

SEQ ID NO: 366652 - protein, 123 aa, Zea mays
  unsure (1)..(123): unsure at all Xaa locations
  Clone ID: MRT4577_97552C.1.pep
KEIQNFSPGKGGSAAPTFFYRERSLAEFFPPTLGKRGFWGGGGTFLGGLETGGGGSFXGGGKKALFKLGELXPGGLMVPVLIYPTGQFSGGQINPAXKLFFGRFRVFPWXIRXPFLWGGQFKG

SEQ ID NO: 366653 - protein, 560 aa, Zea mays
  unsure (1)..(560): unsure at all Xaa locations
  Clone ID: MRT4577_97553C.1.pep
MKARTGLKELRILKNEDTKAKIISGNSVHTTTTTTTITTTALVPLAPKCRSLADDEGYLLPEFNDMVLREFGQDIDSIPSTPAARVREDVSNDHEVHKLRDLVRSLQEREKTLELQLLECYGLQEQDAAVRELENQLKINNVESKLYLLKIESLQTENQRLQTQLSENSKIFSELEATRTKCKFLKKKFISDAEQAKEQIISLQKMVDSLQNKQTDEDPRVRKKFLEFENKLKRLEELEKEATELRAANSRLQQENAHLIRRLEVTRLPPVPKPKTSKSIXEEADRLKQETDRLAKEVEQLQSGRFADVEELVYLKWINACLRYELRNKDAPSGKTVARDLSKTLSPKSELKAKQLIMEYANVGAEDSHLGHVEFGSECSSSRASSGEPDDVSIDIASMTKHTNKNPKKKKFFSKLRKLVLGKGKENREISTLERRVSISSCSFDDFTGRDSHDSYSSFMAEPNMPDSRRHGDHGFGTHSSLDSAKSSPLGTEIVGERSDHSVVKSVSSREEKVNAFGPSIGLDSSKAIPEDVEIHKFADALITSRSGSMSSRRSASFRH

SEQ ID NO: 366654 - protein, 50 aa, Zea mays
  Clone ID: MRT4577_97554C.1.pep
DSTSFPFKKGGKHGPWGSFFIYRAKVLGINTELVCLSIGTFNFCTFARNN

SEQ ID NO: 366655 - protein, 95 aa, Zea mays
  Clone ID: MRT4577_97555C.1.pep
YTCSSTRLFFFLRRRPIGSGTCFSPFGVSNFSLPPEGTFLFRLTKCFGWPYGFFPAQGLANKMGPKDSFSDQMGCCVFVAMFSLKFKLWLFYRVG

SEQ ID NO: 366656 - protein, 331 aa, Zea mays
  Clone ID: MRT4577_97556C.1.pep
EKSKLIRRWGISKPTYLVLIFLDVYISSNAFECNQRKFEGSAILIKGLAFFKYLGIKPWFSIVCWLWKKVNSSEDGGFQSFLDNVQYKATGILRYERIFGDGYVSTGGAETTKEFVEKLNLKPGQKVLDVGCGIGGGDFYMAEKYGTHVVGIDLSINMIMFALERSIGCKCLVEFEVADCTTKTYPDHMFDVIYSRDTILHIQDKPSLFKSFFKWLKPGGKVLISDYCKSPGKPSEEFATYIKQRGYDLHDVEAYGQMLKNAGFSHVIAEDRTDQFLSVLQKELDKFEKNKDDFLSEFAQEDYDDIVNGWKAKLQRSSAGEQRWGLFVATK

SEQ ID NO: 366657 - protein, 93 aa, Zea mays
  Clone ID: MRT4577_97557C.1.pep
DYSCSFHIYPIPFRSSQPLLLAEMTTTQKLILPTKLNLNKSTIYTNLVEKLLKTFHLVTDRQTKKSRRRNAKRQYDPRVSSGGVSRGDGGRIN

SEQ ID NO: 366658 - protein, 113 aa, Zea mays
  Clone ID: MRT4577_97558C.1.pep
KPHPPFLSDPPSSASLASFRSIPPPISLLSSPLRSPSLARALHADHRRLASKLDRRGRSSSRSAAPPAARPGVHLLGLGYGGTAAGAGAQIHLKPWIYEAPGAGAGGIMARFF

SEQ ID NO: 366659 - protein, 78 aa, Zea mays
  unsure (1)..(78): unsure at all Xaa locations
  Clone ID: MRT4577_97559C.1.pep
RYHSLACFPNANFIYITNCFPRRSHHFPRLFCAFLLLRLIVLFYLTRFHSYSILTVSQFVRCFLLLXMHRHNARNLAL

SEQ ID NO: 366660 - protein, 79 aa, Zea mays
  unsure (1)..(79): unsure at all Xaa locations
  Clone ID: MRT4577_9755C.1.pep
CMHFLPRQTGIEHGDWRGEHPACPYVTAAKDQRPRPTANARPSVAPPTSSSPSSLEKIPRRNREQRPRPYDVGRTRXFR

SEQ ID NO: 366661 - protein, 64 aa, Zea mays
  Clone ID: MRT4577_97560C.1.pep
LGGGSLLSIALSTCVRQPGCLCTCVSAPRYSLPRRVNIAPPVGRASGVLIDGGHALEPNSELTY

SEQ ID NO: 366662 - protein, 74 aa, Zea mays
  Clone ID: MRT4577_97561C.1.pep
DDLALFFHSALSLSLSLSLSLSLSSQLSPQITCYFSQEKINQKIKVKKTKLTRPAGVRDSQTARRTWQWRIRSW

SEQ ID NO: 366663 - protein, 103 aa, Zea mays
  Clone ID: MRT4577_97562C.1.pep
EYRQSVPLIKNECTHFHPCVRKRFLPILVAPVAAPSCAFGALPVWSHWVRSWRGSYSVRVEIIGWVGQLLVSRGCPLYDQPRACLHTLEINPASDAAPPGDYE

SEQ ID NO: 366664 - protein, 67 aa, Zea mays
  unsure (1)..(67): unsure at all Xaa locations
  Clone ID: MRT4577_97563C.1.pep
LIIWRFVSHCHFLLFRPRGVVVCFWLFVCLGKTELALHMVWFGVRKNPLKLAPFRVXMEYXKVLVLL

SEQ ID NO: 366665 - protein, 85 aa, Zea mays
  Clone ID: MRT4577_97564C.1.pep
HSRLGHEKEEARAMTGDRMCARQISMCTVRIGRSGNILGKVFAMLSSGYDGTENLPEPSRACLELSPIKRGCQVLSCTSGAGSTA

SEQ ID NO: 366666 - protein, 44 aa, Zea mays
  Clone ID: MRT4577_97565C.1.pep
FPCSCILINPLSVYIYIYLCGLVNVIPTFLSASKYYVLKGLFSP

SEQ ID NO: 366667 - protein, 104 aa, Zea mays
  unsure (1)..(104): unsure at all Xaa locations
  Clone ID: MRT4577_97566C.1.pep
IVFCKIDIHPAVHHRLMVXDTFKISAINVPSSGRGMLSPATVSILPTGKPGISMLPSPPPVGPVXLRCPITPXLTDPDAALMDSVDPAGLMASEEPTKKHNHAF

SEQ ID NO: 366668 - protein, 123 aa, Zea mays
  unsure (1)..(123): unsure at all Xaa locations
  Clone ID: MRT4577_97567C.1.pep
PLWIPKRKKTYPGPGGGGHLPPYNRGLGGTATPTDTSSGGGGYPPPGXYLYPPGDFPPPGYLGPPGEMPPXEYVAPGLSVPPPIHVPHSIVLASPSCQYPTKPARTEVFPPEQPCRNQRRYQN

SEQ ID NO: 366669 - protein, 125 aa, Zea mays
  Clone ID: MRT4577_97568C.1.pep
MTSHAEPQAIKARDRRGVEAILMVSEFFVAHTASLIERGQRSQTIEAHTYKHDFTEAEHPVIPRRSSSFHEKLPVIDPPALAYKRGGSTDTRTTRPEHMENYEGQSQGAHHHDAQGLARLRASDS

SEQ ID NO: 366670 - protein, 72 aa, Zea mays
  Clone ID: MRT4577_97569C.1.pep
WTKMIQKVIYGGPPLLVRRSCPDSSSPSSIFSSTIPMILSYCSILVSTIFSQKNKITQQTFILTSAERNTNV

SEQ ID NO: 366671 - protein, 35 aa, Zea mays
  Clone ID: MRT4577_9756C.1.pep
SDFCFVRMVKYRLWFVEFEIVHCESDYLNRYKAFT

SEQ ID NO: 366672 - protein, 70 aa, Zea mays
  Clone ID: MRT4577_97570C.1.pep
VSYLSPIAHLIVDTHSKFPVRRLRNKDRWLQQGRTVSHLLILMCVRYHFVAGPNVFSVHPPRTQPSLGNQ

SEQ ID NO: 366673 - protein, 123 aa, Zea mays
  Clone ID: MRT4577_97571C.1.pep
DLLPPTQGAAASGSSSSDLVGCETDNGECLDPIMAVLDGALELEADTLNELLPEVQDSFWEQFIGESPVIGETDELISGSVENELILEQLELQSTLSNVWSKNQQMNHLTEQMGLLTSDALRK

SEQ ID NO: 366674 - protein, 76 aa, Zea mays
  Clone ID: MRT4577_97572C.1.pep
AYYCCWYVTCVGNKKKKKKRKDKKKKKKKKKKKKKKKKKKKKKKKKKKKKKKKKKGAAFLKNQILLPRPCKVKLFL

SEQ ID NO: 366675 - protein, 65 aa, Zea mays
  Clone ID: MRT4577_97573C.1.pep
KSSSGHTHHCSLELFDLETTSNHICAPPVTSLSGPIRRSLPTYKQVVLILQKLWSWDISVLNATA

SEQ ID NO: 366676 - protein, 74 aa, Zea mays
  Clone ID: MRT4577_97574C.1.pep
TLVLSCDSLLVLIVPRPLQPMLHQVIGILAFVLRRFCTCITLVSAGNYWLIGRDGHHPLLQNQRDILNVVGQLA

SEQ ID NO: 366677 - protein, 32 aa, Zea mays
  Clone ID: MRT4577_97575C.1.pep
TLLIIQDFVLSQIDYVHVPDLSTNRERSTRLP

SEQ ID NO: 366678 - protein, 103 aa, Zea mays
  Clone ID: MRT4577_97576C.1.pep
TQSWRPVAGRPRGWGCRAHLADLRAAGLRLDRADPLELDCWRSGGYQDKARSRPHDRRHTAAGVTDCSAAPAVLSLSKLQASRHPAEEASGQDHSTRRARPGR

SEQ ID NO: 366679 - protein, 60 aa, Zea mays
  unsure (1)..(60): unsure at all Xaa locations
  Clone ID: MRT4577_97577C.1.pep
ADQLAEAACQSSICGVELRAAASALKRLGDGPRAXSLLLSAHNQRLQLNIQTIQPSSTSY

SEQ ID NO: 366680 - protein, 55 aa, Zea mays
  Clone ID: MRT4577_97578C.1.pep
QLQLGGVAVAQRQRAFLVKWLCHRARDYCFSNTNLRYGFGFGEQDRRRRSAWSQT

SEQ ID NO: 366681 - protein, 138 aa, Zea mays
  Clone ID: MRT4577_97579C.1.pep
SSALHQLVRRPMDHLQVASRCFIFGFVSSDHTMRSSTVTARRCRDHEGDRGVAKKSARRWRRGHRKHENRCRRCSWRWNHRRDPRHEFRSPAKLRRLLDPLLWRLIVDYRRLRREPPYDDLSRSPRGRSSGLGFGRRR

SEQ ID NO: 366682 - protein, 46 aa, Zea mays
  Clone ID: MRT4577_9757C.1.pep
KTKLFSRRRGSSSSTSIRGTCICTHLWRRSTNLICPYRYRREYRAH

SEQ ID NO: 366683 - protein, 131 aa, Zea mays
  Clone ID: MRT4577_97580C.1.pep
EGAYRWLRAFFDHNGGSVEGHVLSDSNQPRWGACEGHRKSFGGDRIAGPCEWGPVGVRRPALGAFWAPCDLFPLSPGGRGCVAWLVNKGGRPGPVYRFTFDSRSRRLLRKVLESWQLKPRLTTTEQTETVQ

SEQ ID NO: 366684 - protein, 106 aa, Zea mays
  unsure (1)..(106): unsure at all Xaa locations
  Clone ID: MRT4577_97581C.1.pep
FNEEVLXKAMKKSDSPRPAVFAMSNPTTKAECTPDDVFKHVGDKAIFASGSPFSNVSLGNGKSGYANQANNMYLFPGIGLGALLSGARHVSDGMLQAAAAQKQMFH

SEQ ID NO: 366685 - protein, 618 aa, Zea mays
  Clone ID: MRT4577_97582C.1.pep
MISPAMCRSAPRRAAQVRRLLSSAAPPAHAGAAVPGPCIVHKRGNDILHDPWYNKDTAFPMTERDRLGLRGLLPPRVMSFEQQYERFINSFRSLEHNTRGEPDSIVALAKWRILNRLHDRNETLYYRVLIDNIKDFAPIIYTPTVGLVCENYSGLFRRPRGMYFSAKDKGEMMSMIYNWPAEKVDMIVVTDGSRILGLGDLGVQGIGIPIGKLDVYVAAAGINPQKVLPIMLDVGTNNEKLLEDKLYLGLRQPRLEGEEYLAVVDEFMEAVHARWPKAVVQFEDFQMKWAFETLQRYRNRFCMFNDDVQGTAGVALAGLLGAVRAQGRPLQDFTNQKIVVVGAGSAGIGVLSMAKQAMLRMPGIHRTGEGHNQFWVLDKDGLITKARKDLDSAVARFARGFGPDEVPDLYEGASLVEVVKKVKPHVLLGLSGVGGIFNEEVLKAMKESDSPRPAVFAMSNPTTKAECTPDDVFKHVGDKAIFASGSPFSNVSLGNGKSGYANQANNMYLFPGIGLGALLSGARHVSDGMLQAAAECLASYITDDEIRKGILFPSVSSIRHITARVGAAVVRAAVAEDLAEGCCDVGPRELGSMSESEAVDYVARKMWYPIYSPLVSDK

SEQ ID NO: 366686 - protein, 149 aa, Zea mays
  unsure (1)..(149): unsure at all Xaa locations
  Clone ID: MRT4577_97583C.1.pep
TATRPFALDDVFKHVGDKAIFASGSPFSNVSLGNGKSGYANQANNMYLFPGXARHVSDGMLQAAAECLASYITDDEIRKGILFPSVSSIRHITARVGAAIVRAAVAEDLAEGCCYVGPKELGSMSKSEAVDYVARKMWYPIYSPFVSGK

SEQ ID NO: 366687 - protein, 76 aa, Zea mays
  Clone ID: MRT4577_97584C.1.pep
MAPKILLILVFLLVGSPAALLVCDVIEMLADKPTYSTFLKVLQVTTDGVDANRLRSATLLVGPVQTCQTSGVAARR

SEQ ID NO: 366688 - protein, 80 aa, Zea mays
  Clone ID: MRT4577_97585C.1.pep
APVHNVVLHHLLPLDFSLEYSTPRSLCLPLLRYIPAILALLVHANTQHLHLATKAVLAIETFLQYHPPSSPWFRHLRGLE

SEQ ID NO: 366689 - protein, 74 aa, Zea mays
  Clone ID: MRT4577_97586C.1.pep
MEYYYAYQHSSSGGLSSKEKRPPLKRGQLKRQIVRTISSLVVPRHAAVAGAAAAAGSREKEDRGSGFGGGRSYD

SEQ ID NO: 366690 - protein, 226 aa, Zea mays
  unsure (1)..(226): unsure at all Xaa locations
  Clone ID: MRT4577_97587C.1.pep
LGPSRPAGPRTVPPRHRPPHPPQISPWRRARTPGRSPVTFLSHLELRPHRRSCHTGAHPPTSSPLCVIHHCASSTRGPHPLPPSPPRHPLVMFGIPRPPSRGSATSHLSATRLSFWRQRSRDTSASVAWCCGSYRRRTLARGWPGRRSTAASRTRSSASSRRSCSSPAPAXAMTTRAPTPVPPSKGSRGWPAAPPRSSGGVEFGSAPLRCGGLFGNDPVAGRLASY

SEQ ID NO: 366691 - protein, 70 aa, Zea mays
  Clone ID: MRT4577_97588C.1.pep
MEYYYAYQHSSSSGSGLSSKEKRPPLKRGQLKRQIVRTISSLVVPRHAAVAGSREKADRGSGFGGGRSYN

SEQ ID NO: 366692 - protein, 71 aa, Zea mays
  Clone ID: MRT4577_97589C.1.pep
MEYYYAYQHSNSNSSGGLSSKEKRPPLKRGQLKRQIVRTISNLVVPRHAAVAGSREKADRGSGFGGGRSYN

SEQ ID NO: 366693 - protein, 68 aa, Zea mays
  Clone ID: MRT4577_9758C.1.pep
WTNKGRMTREKDRIAKAKQAKGTAPGERRKRGGFFFYLTRWRENKNYIGSSVKQAHRGQGPTHQRKPP

SEQ ID NO: 366694 - protein, 400 aa, Zea mays
  Clone ID: MRT4577_97590C.1.pep
PAGSGSHNSKIGLILGTVGGILGLIIVGALFLICNARRKSHLREVFVDVAGEDDRRIAFGQLKRFAWRELQIATDNFNERNVLGQGGFGKVYKGVLPDGTKIAVKRLTDYESPGGEAAFLREVELISVAVHRNLLRLIGFCTTQTERLLVYPFMQNLSVAYRLRDFKPGEAILDWPSRKRVAIGTARGLEYLHEHCNPKIIHRDVKAANVLLDEDFEPVVGDFGLAKLVDVQKTSVTTQVRGTMGHIAPEYLSTGKSSERTDVFGYGIMLLELVTGQRAIDFSRLEDEDDVLLLDHVKKLQREGELDSIVDINLNQNYDGEDIEMIIQIALLCTQASPEDRPSMSEVVRMLEGEGLAERWEEWQHVEVTRRQEYERMQRRFDWGEDSFYNQEAIELSAGR

SEQ ID NO: 366695 - protein, 114 aa, Zea mays
  Clone ID: MRT4577_97591C.1.pep
ERRRRTDRKPGDQRRRKTAHSRKQKETNQAREQDGKTPTSGEKRPERKKRRKKQARGDRRNGHKTTPRKKKRAGTPKKQTKPHRGRRKKEAKPKRRKPKKEEGKEPGGRQKNRK

SEQ ID NO: 366696 - protein, 47 aa, Zea mays
  Clone ID: MRT4577_97592C.1.pep
FEQATRTCWLCFWCYIVVLEWSGCFVLSPDHFRCGTLRSVNCSFFFF

SEQ ID NO: 366697 - protein, 63 aa, Zea mays
  unsure (1)..(63): unsure at all Xaa locations
  Clone ID: MRT4577_97593C.1.pep
FLKXKHGXLYLFIETMYIIKSFNLXFPIFSIISNHFCTVYHFFFFFHLHKNTILHSTIPHNFF

SEQ ID NO: 366698 - protein, 55 aa, Zea mays
  Clone ID: MRT4577_97594C.1.pep
TIGLTTLTPTIYSISLPIYGHSIIILPDNYCLYSIYHFNFATADDIQNTNIFYIL

SEQ ID NO: 366699 - protein, 90 aa, Zea mays
  Clone ID: MRT4577_97595C.1.pep
GGLLKLGENLGIVVSGGKLFPLQNSPQNTSRKLKGETRGGLRGDPPPFFGVGLPAPFTGGKPVRPLVLINRPPPREGGFFIWPPGGFFFS

SEQ ID NO: 366700 - protein, 57 aa, Zea mays
  Clone ID: MRT4577_97596C.1.pep
KELAWFSMDHLVYLMNSLKNAYTFCSRKFNVNTHVLNNYLAVPHKAPKRLYSSDGVC

SEQ ID NO: 366701 - protein, 107 aa, Zea mays
  unsure (1)..(107): unsure at all Xaa locations
  Clone ID: MRT4577_97597C.1.pep
PGQAPRAKARLAPSQGQRGQGTQPQCEGPRETSGRNGGRPATRTKERSAGTKTTPPTPPSGWAKQSAGASAAAPGHTGERLSDDPPRQWEQQEQHRPRGRXTEPLQF

SEQ ID NO: 366702 - protein, 93 aa, Zea mays
  Clone ID: MRT4577_97598C.1.pep
PTRPITRTCKRSKNATGKQEAAAVLNIDAPKQALTQIEDCAKDERRDIKSQLADYPTTDNAPAVDELTTPIMVQYRHSYIHPAPSYKKRYEKP

SEQ ID NO: 366703 - protein, 650 aa, Zea mays
  Clone ID: MRT4577_97599C.1.pep
MSKSDLDDLLLQAAGRTGKNQSRPSNPRWNSGGSGSDGFDDDDDEDSDAAPTYSRKKPSSQVPLKKRHKPEKGGRRGGGGWNDEDDEDEDGRRSGGEDSDSAPSVGSDLYKDEDDKERLENMSELQRELILAERGTRLDDYKLKQRARASSSKTDKVGAPKDSSPPPPPSRMRSSTRTDKSGSAAKSALDELRAKQRMRQQAPEARRFTDLLPHSGSSIRRRAGSPPSDGSNDGNNRGRLNDHGRIAGDGRDDEFDESPSRLDPLKFDDVKSITLRRSKLVKWFMEPFFDDLISGCFVRLGIGKTKNGTPSYRLCIVRNVDASDPDRNYKLENYSTCKYLNVVWDSEANAARWQMTQVSDSPPNEEEFKEWLQAAEKNGARIPTRQEVLDKKEAIQNAYNFVYSAATVQQMLQEKSAVRRPINIAAEKDRLRSELEMALSRRNEHEAERIRVKLKNLQSRPQPVSKDNKAAKLEAMNRKNRADNFKNASELKPVNTSLKAGEAGYDPFSRRWTRSRNYYASKPGGDNVEETANGSSSNVEPSNGDIKSKAQTGTAATTAAQVAAADAGKLIDTNAPVDLGTESNVMHTFELPISLSALQEFGGAKGLFDGYMARRQKIEATMGYKVPDNDGRRHALTLSVSDYKRRRGLL

SEQ ID NO: 366704 - protein, 120 aa, Zea mays
  Clone ID: MRT4577_9759C.1.pep
ELERKRNEFKGSQEEILGFSSSLFTKNSIIRALQTLKKFLSQELDPPKRNIQVLEGTHEVLKAGYDKAMDKAICAGRFLMKRPGVVVFDEIVADVLAAPVKTPAPRGPRADSPPKDAPEN

SEQ ID NO: 366705 - protein, 49 aa, Zea mays
  Clone ID: MRT4577_975C.1.pep
WHKRNGKAHAQPVRCHHAPNRERQPAHTRLLVLLSILPRKLRLSCHGPW

SEQ ID NO: 366706 - protein, 61 aa, Zea mays
  Clone ID: MRT4577_97600C.1.pep
SAQLSQQMHIGADARNIVESVERPAQSEIPFRGDPAAFCNHSHSRLKHASFHRCQAPCTSL

SEQ ID NO: 366707 - protein, 52 aa, Zea mays
  Clone ID: MRT4577_97601C.1.pep
LWNPVFAANKDPMMMMTHTIHGFKHDVSFIISHTSGNIYEKKLFTPHVLCYF

SEQ ID NO: 366708 - protein, 209 aa, Zea mays
  Clone ID: MRT4577_97602C.1.pep
HASAEAERIRVKLKNLQSRPQPVSKDNKAAKLEAMNRKNRADNFKNASELKPVNTSLKAGEAGYDPFSRRWTRSRNYYASKPGGDNAEETANKSSSIVEPSNGDIKSKAQTGTSATTAAQVAAADAGKLIDTNAPVDLGTESNMLHTFELPISLSALQEFGGAKGLFDGYMARRQKIEATMGYKVPDNDGRRHALTLSVSDYKRRRGLL

SEQ ID NO: 366709 - protein, 195 aa, Zea mays
  unsure (1)..(195): unsure at all Xaa locations
  Clone ID: MRT4577_97603C.1.pep
MSKSNLDDLLLQAAGRTGKNHSRPSNPRWNSGGSGSDGFDDDDSDAAPTYSRKKPSSQVPLKKRHQPEQGGRRGSGGWKDEDDEDEDGRRSGGEDSDSAPSVGSDLYKDEDDKERLENMSELQREMILADRGTRLDDYKLKQRARASSSKTDKVGARKDSSPPPPPSRMRSSTRAXQSGSAAKSALDELRAKQRM

SEQ ID NO: 366710 - protein, 99 aa, Zea mays
  Clone ID: MRT4577_97604C.1.pep
SRAARCGGCPGIGLWWLLKRPSRPRSSFWWARTAPGVTFVSLESACVHAVCVLQPSPRFFPSWCYSGGSFPPVGLSFVAPGRFLLFGLLNGQWHCDMCT

SEQ ID NO: 366711 - protein, 100 aa, Zea mays
  Clone ID: MRT4577_97605C.1.pep
GKSKLKPEKARNLDNTVLQGPGLSGFQRSTVPTDASQNGRIVEVLPCQGSRGLSPDTPTPPASPHRSRFASHLGRRRCRRLRAQRSAGEKTAVSMCALRC

SEQ ID NO: 366712 - protein, 118 aa, Zea mays
  Clone ID: MRT4577_97606C.1.pep
GLHAPTSGASRPWCPLWERRDALVPVKALCARVPLGHGVLLPLTCVCAQGSSSRHGLAGCLSRACHCSLCCCDALLPSRSRVVCRLLLLLRVRCCRGCCTPVACSRLSAPYAGVVDSW

SEQ ID NO: 366713 - protein, 365 aa, Zea mays
  Clone ID: MRT4577_97607C.1.pep
MVREAVGADGFSFSTVLSGLAVTASLASGLQVHAQLVKSGFCDDVCVGNSLVEMYMKSKCLADGVMAFAEIRCKDVVSWTGLAAGCLHCGEPAKAIGILGQMMLDGVMPNNYTFATSANACASLTDLDEGRKVHGYVIKLGDDSDVGVNNALIDMYAKCGSVACAHKVFQSMQQRPVISWTAMIMAFAHNGRAREAVEVFDNMLLRGVAPNRVTLVCVLYACSQGGFVDEGWIYFNAMKDKFGIQPGEDHYACMVDLLGKAGQIEEAEELISGMPFRPGVLVWQALLGACHLHGNEAVGRRAAEHALALENDDPSTYMLLCNTLAGQHDWDGARSVRVLMGSQTLKLPGSSWFQSMSDRSQACIR

SEQ ID NO: 366714 - protein, 50 aa, Zea mays
  Clone ID: MRT4577_97608C.1.pep
PTRAPTRPVTRGVARHRRCEIHVGIQHKDTKEDSMKWFQVKFQGVILNKA

SEQ ID NO: 366715 - protein, 66 aa, Zea mays
  Clone ID: MRT4577_97609C.1.pep
LFICPCCMNANEQFKPHVTLPNINSVVWRKISQFITVLLSSFSDYQGRCWSTRCFNQTRGATTESR

SEQ ID NO: 366716 - protein, 183 aa, Zea mays
  Clone ID: MRT4577_9760C.1.pep
MEYTLLPDLAPHKIHAKIQVHVSRKWLFRGATDSGPLQHVDMVLSDREGNAIYAEIPGNLAEQKATNIEEGGVYDINRFRVCAAKTVFKIVDGDKMIQFTFHTIVKCATSPPTTFPLYVYRLTSFDLIEPHVQTTNNFVDVLGVITEIHELTPVHVRSQLTPTVTRTIIIEDLRCLPKWWSCL

SEQ ID NO: 366717 - protein, 224 aa, Zea mays
  unsure (1)..(224): unsure at all Xaa locations
  Clone ID: MRT4577_97610C.1.pep
MENGSSKGDVTEDANAHCPGTQSDEAGKADSCAGCPNQQICATAPKGPDPDLVAIAERMATVKHKILVLSGKGGVGKSTFSAQLSFALAEMDHQVGLLDIDICGPSIPKMLGVEGQDIHQSNLGWSPIYVESNLGVMSIGFMLPNPDDAVIWRGPRKNRLIKQFLKDVDWGEIDYLVVDAPPGTSDEHISIVQYLXATXVDGAIIVTTPQQVSLMDVRKEIXFC

SEQ ID NO: 366718 - protein, 60 aa, Zea mays
  Clone ID: MRT4577_97611C.1.pep
CSVHPKPLAKGELQANYMTFTAHASIMDQSGGSSPIRKDENKGNAPARLAVGHQTHSLSR

SEQ ID NO: 366719 - protein, 51 aa, Zea mays
  Clone ID: MRT4577_97612C.1.pep
VLCRFRSFARVCCVPALVVNCLRVTPTSSLLSYNRTPSWNYLKTFPAIHKT

SEQ ID NO: 366720 - protein, 59 aa, Zea mays
  Clone ID: MRT4577_97613C.1.pep
LFGFEGFVVSAQGRIIDCLVEVWGQKPGEKCPLMAFDAKIERYFLASILSSFLRTRGSS

SEQ ID NO: 366721 - protein, 81 aa, Zea mays
  Clone ID: MRT4577_97614C.1.pep
TNRIRLKQTKGAGAQYLRNNFWKGKRGKGFLNQRTVKIHPGPASSIPPSYYTAQLNSLGSLWLIFPGGKHIGQKGALGTIG

SEQ ID NO: 366722 - protein, 503 aa, Zea mays
  Clone ID: MRT4577_97615C.1.pep
MAYSSRTCGRCNNHERRSGFMKWLCNFLKGPKPGEPNRRRPQVTAGEEEDALWHQRPVRPKNDPPRNDNEEVDRAIAESLTEDVRTPKEKTRKGDKDDEDLARAIQDSLNMNPYTPYNPYAPSHAQPRGHRLCAGCKHEIGHGHYLSCMGIYWHPQCFRCNSCGHPIRETEFTLLSTDPYHKLCYKELHHPKCDVCLQFIPTNRSGLIEYRAHPFWGQKYCPSHEHDRTPRCCSCEKMEPRNTKYMSLGDGRSLCMECLGSAVMDTGECQPLYHSIRDYYEGMNMKLDQQIPMLLVERQALNEAMEGESRGPHHMPETRGLCLSEEQTVSSILRRPRIGGNRLLDMRTQPQKLTRRCEVTAILVLYGLPRLLTGSILAHELMHGWLRLKGYRNLNAEVEEGICQVMSYLWLESEILPSSSRHAQPSSSYASSSSSSYSYPPTSSKKGGISHTEKKLGEFFMHQIAHDTSTAYGDGFRTAYAAVNKYGLRQTLNHIRLTGGLPV

SEQ ID NO: 366723 - protein, 409 aa, Zea mays
  unsure (1)..(409): unsure at all Xaa locations
  Clone ID: MRT4577_97616C.1.pep
NGSGLIEYRAHPFWGQKYCPSHERDRTPRCCSCEKMEPRNTKYMSLGDGRSLCMECLGSAVMDTGECQPLYHSIRDYYEGMDMRLDQQIPVLLVERQALNEAMEGESKGPRHMPETRGLCLSEERTVSSILRRPRIGGNRLLDMTTRPQKLTRRCEVTAILVLYGLPRSGNFIFISGGHHFFVPTRLPDSNTAVLLIFCDRWCHRLCHNAIXLLTGSILAHELMHGWLRLKGTWMDGQNISYNHLSSLFMNXGSILAHELMHGWLRLKGTWMDGQNISYNHLSSLFMNFLESSTGSYFSXGYRNLNAEVEEGICQVMSYLWLESEILPSSSRHAQPSSSSSSSSYPATSSEKGGISHTGKKLGEFFMHQIANDTSTAYGDGFRTAYAAVNKYGLRQTLSHIRLTGGFPV

SEQ ID NO: 366724 - protein, 73 aa, Zea mays
  Clone ID: MRT4577_97617C.1.pep
SYKSCFIDNLTYSMLLKMMSGTTEILVGIKRFYILAASNSIYKAQAPCSASMFNSSFLTLFIFYTRTVPQRVS

SEQ ID NO: 366725 - protein, 76 aa, Zea mays
  Clone ID: MRT4577_97618C.1.pep
ILLWRDISFYFYQLGRIFPRTPNIHLLNIKDSPPSSLMPNRLSNGVWRPNGAFVGHTPFESIFGASSKWKALALIQ

SEQ ID NO: 366726 - protein, 141 aa, Zea mays
  Clone ID: MRT4577_97619C.1.pep
GGHPGKFFVFSWTPCKDWVVPRVPWAPPPPIWQRAGTLSPGEDVFPFSVGPAKIFLSPPSPRGFFPPSPVGAPRWDPRPPGIFSRVKVGCGLPPGGDLFAWRVGGFSPRRFGFLSPLWPYPPPVCLDLFVPVVFCGFPFYP

SEQ ID NO: 366727 - protein, 503 aa, Zea mays
  Clone ID: MRT4577_9761C.1.pep
MEYTLLPDLAPHKIHAKIQVHVSRKWLFRGATDSGPLQHVDMVLSDREGNAIYAEIPGNLAEQKATNIEEGGVYDINRFRVCAAKTVFKIVDGDKMIQFTFHTIVKCATSPPTTFPLYVYRLTSFDLIEPHVQTTNNFVGVYLSGGPACRWYFNPTIPEAEPYLTSQSTKRIVLQLPQNLQHPPAMETKPIVEHKSLYELLTVNPYDFPETGFECTITIAEIPAEHKWWFPSCTKCNKATIPHTTGYHCESCNWDGYKFKYKLKFLASDETDIAEMFCFDTVARHIVGKSCEIVLRSVTEQSPIPPDLAQIISLKFTFRVTIDNQSLFQQTSCPNVFRINSIVAAHGRQRSLPMQIGISDQQGPSTPQNKSKPMLLEDSPSTTLEKLSTTTPTTVVRKLLYSETDNTPKTHSISFTQLSFIHFKIYANKSNINSPEKDDGDKETAQNFDICSLIQYPLTKEKDQQIQLNRHLKGSNKGRYASEKKWTSNPPRTKVSLRSSSTF

SEQ ID NO: 366728 - protein, 60 aa, Zea mays
  unsure (1)..(60): unsure at all Xaa locations
  Clone ID: MRT4577_97620C.1.pep
ASFTGPESACSISPLVRRARSGAPGXGPHPRPRWRVSGRPAAPSPRGCLKGGQGGDGRRL

SEQ ID NO: 366729 - protein, 412 aa, Zea mays
  Clone ID: MRT4577_97621C.1.pep
MEDGCGTFELIQDESKAGACLWITKRRGMEYWPTPEEQRKYMVNPNKSKRMLTNNIYPSIRMPEFFEKIVVHTLSHNFRNATRLERVQLRFPIKAHSALVKIIYAGVNASDVNFSSGRYFSGNPKETASRLPFDAGFEGVGIVAAVGDSVSHIKVGTPVALMTFGSYAEFTEVPAKHLLPVPRPDPEVVAMLTSGLTASISLEKAGQMTSGQVVLVTAAAGGTGQFAVQLARLAGNKVVATCGGESKAELLASLGVDRVINYRNERVKDVLKKEFPRGVDIIYESVGGEMFDLCLNALAVHGHLIVIGMISQYQGEDGWKPKNYTGLCEKILAKSQTVAGFFLVQYAHLWQDHLNKLFDLYASGKLKVSLDPKQFLGVASVVDAVEYLHSGKSVGKVVVCIDPSYGQIVAKL

SEQ ID NO: 366730 - protein, 89 aa, Zea mays
  Clone ID: MRT4577_97622C.1.pep
WGLSGLIASTISFPLEVARKRLMVGALQGKCPPNMIAALSEVIREEGFLGLYRGWGAACLKVMPNSGMTWVFYEAWKDILLSDRDRQHA

SEQ ID NO: 366731 - protein, 214 aa, Zea mays
  Clone ID: MRT4577_97623C.1.pep
MESFVQKHVVGVPLTSFAYADEERRGKPSCSAMVHKKNKKGSFICWMNKLSHKTDNYMQGFKEHLSLGPKVSETIKGKLSFGAKVLQAGGIDKVFREYFTVEEDEKLLKAFQCYLSTTAGPIAGMLFISTKKIAFHSDRPLNLLSPKGGRTRVPYKVLIPTKRIKSASVRGNLYNPDEKYIDVVTVDGFDFWFMGFVSYEKSFRYLQHAILELR

SEQ ID NO: 366732 - protein, 90 aa, Zea mays
  Clone ID: MRT4577_97624C.1.pep
PPPPLFPRPGAKKRRDPLVLLKNKTCRAPRYKLRIPPWLSPVGKSYRASLYRFCSNCKTAGTRNWFKPVCPAPPKPLFFANLMFFPPLSC

SEQ ID NO: 366733 - protein, 59 aa, Zea mays
  Clone ID: MRT4577_97625C.1.pep
LLGCPPFFFFYFFFFFFFFFFFFFFFFFFFFFFTKNELNDVIIRRMALHQRMNVKIPSK

SEQ ID NO: 366734 - protein, 280 aa, Zea mays
  unsure (1)..(280): unsure at all Xaa locations
  Clone ID: MRT4577_97626C.1.pep
MRQLSYLSGLDGLDDGVADCDGSCGLRDDGPPCLLHSGLCCPIGPLDDETDTVAIAIDNDKELLQDLAVAAGRVAASPLSSGNSPSSSAVETTTTLPPTPWRFVVPRRKRRKRRDRRPVVMRGSIRPGIPTLHAAAMSSSSSSSGNNRPCSLTAETSSPPQLWRLVVPTRKRDRRPVVMRGSIKRPCSLGTTPGIPTPHAAGNSNPSSSSGGGSTGARXVGEPAGAAAXRRQRTGSEFRXCSNCGSTETPLWRTGSDGSATLCNKCGLRLSRNRQAAQAS

SEQ ID NO: 366735 - protein, 219 aa, Zea mays
  Clone ID: MRT4577_97627C.1.pep
MRQLSYLSGLDGLEDGVADCDGSCDLRDDGPPCLLHSGLCCPTGPLDDETDTVAIAIDNDKELLQDLAVAASLSSGNSPSSSAVETTTTLPPTPWRFVMPRRKRRKRRDRRPVVMRGSIRPGIPTLHAAAMSSSSSGNWPCSLAAETTPPPQLWRLVVPTRKRGRRSVVMRDSIKRSCSLGTTPGIPTPHVAGNSNPSSSGGGSGGGSTGARRQLESLQ

SEQ ID NO: 366736 - protein, 227 aa, Zea mays
  Clone ID: MRT4577_97628C.1.pep
MEGTTQPTAGAREKLLPTSAAVFSPPYLDPHPADSYTYTVFLVPVRLRRGLCRGGRCIVPCLTVLFLLALAGFLLWPADPDISLARLHLAHVSVVARPAVAVTISATLKVRVRNPDLFALDYTRLDVAIGYRGAGLGRVTSGGGRVRARAVSYVDANLQLDGIRVVEDAMYLLEDLAQGSVPFDTIAEVEGHLHFLFLSIPVKGRISCVMHINPHNQTIVHQDCYPE

SEQ ID NO: 366737 - protein, 68 aa, Zea mays
  unsure (1)..(68): unsure at all Xaa locations
  Clone ID: MRT4577_97629C.1.pep
LGPAGCSPGGRSSLSHCHRFCRKKEERNXRGETDGAEERAWGRHALLCYEAXRXXAIDGRGGVLVEWT

SEQ ID NO: 366738 - protein, 136 aa, Zea mays
  Clone ID: MRT4577_9762C.1.pep
IRLEIRTRRKKGSGLHPFHFQRTTLSPFTNGDCGSIVRRLLRRPLFKSGYTQASNYRKIPLTYLHLIPDQVSYRTRKMEYTLLPDLAPHKIHAKIQVHVSRKWLFRGATDSGPLQHVDMVLSDREGNAIYAEIPGI

SEQ ID NO: 366739 - protein, 115 aa, Zea mays
  unsure (1)..(115): unsure at all Xaa locations
  Clone ID: MRT4577_97630C.1.pep
HHHITSITLLQKKTIPLKTFKTNFLTIFSQHRIKINIKYHPRFINSTNSPTNSYLILTTKPNPPLLLTPNLHQRFTXSFTQLIFPYKSTPNTIIRTIIIKGLTLYHLKSHLQKYP

SEQ ID NO: 366740 - protein, 87 aa, Zea mays
  Clone ID: MRT4577_97631C.1.pep
PPSHPVRVFFRKVLLSSVGWVITSRWTPNTFSTPPLSAASTIPLSTTYIYSHLTPTIQIIYPRPYSIGRLTSSSASTSSSSSPRRSI

SEQ ID NO: 366741 - protein, 84 aa, Zea mays
  Clone ID: MRT4577_97633C.1.pep
PWTLYLKTTIFPIKLSWLRCLHGVKDSDEWHQTDPIQSILSFSTSMIALTTSPLHMGDHSLQNDWKYLQADQCQLQIIRKEKKT

SEQ ID NO: 366742 - protein, 448 aa, Zea mays
  Clone ID: MRT4577_97634C.1.pep
MARRNAGAMQREGSAGSVKDWSEFDPSPSPKLAYSQSYVAMRGLLTSVASLDPVLTSSSLKSLWAALSSHRHARSLERPKYKGMNWKRPMFHLLVCFLVGVFIGFTPLFSLDLSSNIDSENETLPFDGDVVNRQMLELKSTRLEPIVAAAETEAAQEQQVDESPPVPAMLDDEADFIEASHVQPSVNDSDIGAKKQLIIVTTTSVRPHQAYYLNRLAHVLKNVPPPLLWIVAEWPYQSREAAEILRSSGVMYRHLICNRNSTNIRKIIVCQKNNAIFHIKKHRLDGIVHFADEERVYSVDLFEDMRKIRRFGTWPVATHVGARYKVVLEGPVCRGNQVTGWHTNKRGGVPRRFPIGFSGFAFNSTILWDPQRWNSPTLESIILHSGGRGGLQESRFIEKLVEDETQMEGLADNCTRVMVWNLDLEPPQLNYPTSWQLQKNLDIVVPIT

SEQ ID NO: 366743 - protein, 130 aa, Zea mays
  Clone ID: MRT4577_97635C.1.pep
MGNVEATTTSSIVAPELLLGDALLKVAVFAVVQALVYLILRKSSGVFAPAAGMTARSFSFRPMRSMSVRRVLAAFSDVPVGVPEPEDRAPSPSPMDPGAEPASECEFILLATGGILCKYFFTKCPRLYTR

SEQ ID NO: 366744 - protein, 96 aa, Zea mays
  unsure (1)..(96): unsure at all Xaa locations
  Clone ID: MRT4577_97636C.1.pep
GTSSXAGLLFQPDISHTGEFCTLADAPSFWALRCVAPQSNKTRHTSSWSAPMHAAAVRAPEWRSRGEVCRGGRRYRRSDNEQGNRCILGAERGIRQ

SEQ ID NO: 366745 - protein, 47 aa, Zea mays
  Clone ID: MRT4577_97637C.1.pep
FMCLSDCRADERHNDDEKNVKTSEADTGKLGWYGLKRCGGSGGGNYY

SEQ ID NO: 366746 - protein, 27 aa, Zea mays
  Clone ID: MRT4577_97638C.1.pep
MYTHIYIKVQIGLCYALYPSTLKNVLV

SEQ ID NO: 366747 - protein, 74 aa, Zea mays
  Clone ID: MRT4577_97639C.1.pep
TSPTDSTGRLLQRLTTDQGKASATCHLLDLQTLLPLWDKYFAHDTNAPNYVSYSMIFSARSAWLALILTIMKSS

SEQ ID NO: 366748 - protein, 184 aa, Zea mays
  Clone ID: MRT4577_9763C.1.pep
AWWTAPRRRPSRRGGGRARSDDHEQQRHRHGRGRGRPRAPPPPPPAVTVPAAVPVPGAPAPTTVVVPPLPPVEVGRELATLSTAASSDGAASSRVHRCSICHKEFPTGQALGGHKRKHYDGGAATSEVGSSGNGSSAARAFDLNLPAVPEFAFRCGAKPGKMWDEDQEVQSPLAFKKPRLLMTA

SEQ ID NO: 366749 - protein, 75 aa, Zea mays
  Clone ID: MRT4577_97640C.1.pep
IFKPCRIIMLRIQLPRWRCQISEARRSRCHVCKILITVAAVAESNRHIAYSKIKSSRGGRRADQPNRTQQCTNLT

SEQ ID NO: 366750 - protein, 56 aa, Zea mays
  Clone ID: MRT4577_97641C.1.pep
TRARIYKHDSVVVPLFFFSSHVVPVSDSSSYINAKKPHGTRPKAVVTLLLPLFTWF

SEQ ID NO: 366751 - protein, 78 aa, Zea mays
  Clone ID: MRT4577_97642C.1.pep
GRGSAASAGDTPYATINRAAAAEDVRRRTTTATTTPLSFHRNSLFGYLRSNPAIHSISRKLGGSGHSGSSSSSSRGSS

SEQ ID NO: 366752 - protein, 184 aa, Zea mays
  Clone ID: MRT4577_97643C.1.pep
MAGSLAASAFFPGPGASPAASAKTSKNLAGELPDNLSVRGIVATPNAPSGNMQVKAQAQALPKVNGTKVNLKNASPDTEEAIPYIAPKTFYNQLPDWSMLLAAVTTIFLAAEKQLTLLDWKPKKPDMLVDTFGFGRIIQDGLVFRQNFWIRSYEIGADRTASIETLMNHLQETALNHVKTAGLL

SEQ ID NO: 366753 - protein, 89 aa, Zea mays
  Clone ID: MRT4577_97644C.1.pep
GGAGKKNSWTPTISGPTIQSNFWEKQHPPVWQKKPNPPLQKTLRGKIPGKSKKRPARKRGGKVQHPANPPNVPPSKHFRKLADTLPYLF

SEQ ID NO: 366754 - protein, 426 aa, Zea mays
  Clone ID: MRT4577_97645C.1.pep
MAGSLAASAFFPGPGASPAASAKNLAGEVPDSLSVRGIVAKPNANSGNMQVKAQAQTLPKVNGTKVNLKNASSDTEEAIPYTAPKTFYNQLPDWSMLLAAVTTIFLAAEKQWTLLDWKPKKPDMLVDTFGFGGIIQDGMVFRQNFIIRSYEIGADRTASIETLMNHLQETALNHVKTAGLLGDGFGATPEMSKRNLIWVVSKIQLLVEKYPLWEDTVQVDTWVAAAGKNGMRRDWHVLDCKSGCTILRATSVWVMMNKNTRRLSKMPDEVRAEIGPYFNARAAITDEQSEKLAKPGSTAGGDAMKQFMRKGLTPRWWGDLDVNQHVNNVKYIGWILESAPIAILEKHELASMTLDYRKECGRDSVLQSLTTVAGECVDGDTDSTIQCDHLLQLETGADIVKAHTEWRPKRAHGEGTPMGGFPAESA

SEQ ID NO: 366755 - protein, 101 aa, Zea mays
  unsure (1)..(101): unsure at all Xaa locations
  Clone ID: MRT4577_97646C.1.pep
RTATLEYCHRSARRHXXATPDITGGEARRRPAGVAIMVRPPARSVFGRLTTQRHSQSGSAPAVRHLRHGALVRYCAGAQRHSRTGTGLPQPGPSRPARRGT

SEQ ID NO: 366756 - protein, 201 aa, Zea mays
  unsure (1)..(201): unsure at all Xaa locations
  Clone ID: MRT4577_97647C.1.pep
TYVLYLVATIAMIHVIGMFEVRWAGITLLDWCRNEQFYMIGATGVYPTAVLYMALKLVTGKGIHFRLTSKQTEACSGGDKFADLYVVRWVPLLVPTIAVLAVNVXAVGVAVGKAATWGLLTRHAQHALLGMVFNVWILVLLYPFAXGVMGRWGKRPAILFGVLVMAIGAVAVVYISFRATYYPTGWSEMETSALGKAESFF

SEQ ID NO: 366757 - protein, 75 aa, Zea mays
  Clone ID: MRT4577_97648C.1.pep
ETDLTAAAVELERKQNPCPRVEQEQDRPPGLVDREESALGFGFIYICMHACQNPLYSLTLIDQLARYQYPIQQDV

SEQ ID NO: 366758 - protein, 82 aa, Zea mays
  Clone ID: MRT4577_97649C.1.pep
IEKGKELTWADLPHFGPLPFSPPRSPSPPCACRQQGPTGQSLCGTLALGPSLCARDPTCHPEPNEPDRVPRLAIGRTPISPA

SEQ ID NO: 366759 - protein, 402 aa, Zea mays
  Clone ID: MRT4577_9764C.1.pep
MQQQGRFTDATTEDGIAGTDEEPVVPNNVTLMTLLPGCAMLAAPAKGKEIHGYAMRHALDSDIAVGSALVDMYAKCGCLALSRAVFDRLPKRNVITWNVLIMAYGMHGLGDEAIALFDRMVMSNEAKPNEVTFIAALAACSHSGMVDRGMELFHSMKRNHGVQPTPDLHACAVDILGRAGRLDEAYSIITSMEPGEQQVSAWSSFLGACRLHRNVPLGEIAAERLFQLEPDEASHYVLLCNIYSAAGLWEKSSEVRNRMRQRGVSKEPGCSWIELDGVIHRFMAGESAHPESTLVHAHMDALWERMRNQGYTPDTSSVLHDIEESEKAAILRYHSEKLAIAFGLLRTPPGATIRVAKNLRVCNDCHEAAKFISRMVGREIVLRDVRRFHHFVDGACSCGDYW

SEQ ID NO: 366760 - protein, 118 aa, Zea mays
  unsure (1)..(118): unsure at all Xaa locations
  Clone ID: MRT4577_97650C.1.pep
YIPLAKNGTERHXRAPLSPLWDLFXXIRYFXLVNNEXSFXPIAYXRXTXTVXXFRGAYGXXAISXHHQMEXKPXLXXSIKAXYXGPLPFKYWXTXXIXXLFYXKYXXQLXLLAXSLHK

SEQ ID NO: 366761 - protein, 71 aa, Zea mays
  unsure (1)..(71): unsure at all Xaa locations
  Clone ID: MRT4577_97651C.1.pep
VGYXIKPSLHPFHSPLLLILSCPLKGDLSLADSITCLSHSLLSPLFHSGPQRFAQNFXEPSHCNLLLSPSI

SEQ ID NO: 366762 - protein, 110 aa, Zea mays
  Clone ID: MRT4577_97652C.1.pep
RSLAPLPHRCLRAALAATCLLLRYPRPKQNMNCISRAPRWAQCAPQAASDQLFRLRIKWTDWICDFDVAHGGAYQSGNVIGHASLCLKLMLLAAMMLSTDKEICSALPGN

SEQ ID NO: 366763 - protein, 100 aa, Zea mays
  Clone ID: MRT4577_97653C.1.pep
LGLCSSFTPSGFSLGSFMSFWSSGLLLSSPFSCVHVSLTALRFVSFRCLYPLVVCAFAFVANRSPASPAGRRGARGRAVVAVPGGCWSPPKTPASAVGRR

SEQ ID NO: 366764 - protein, 91 aa, Zea mays
  unsure (1)..(91): unsure at all Xaa locations
  Clone ID: MRT4577_97654C.1.pep
SSPVSHLSSLQHQPSTTELAAVCSPPPPRLGLGATKLCPAMPGLAANDNSPPAAAPAPRRLSSPLPGRGRAXPVAYAWTGLPSSAHTLRLT

SEQ ID NO: 366765 - protein, 344 aa, Zea mays
  Clone ID: MRT4577_97655C.1.pep
MGSGMSRGRRRGFGAGASGGMLPLLALQVLIEYGRAGASRPPVTAALLAGNALIYLRPGALDGILPSVTRVSFNPRLIVENGDLVRFFLSPFYHLSESHLFYNMTSLLWKGIQLETSMGSVEFASMVAALLGLSQGIALLLSKGLLLLGDYTAYYDQYAVGFSGVLFAMKVVLNAWSEDFVYLHGMVIPAKYAAWAELILIQVFIPGTSFLGHLSGILAGLVYLWLKRAFNGPDPLTLLVSSITKVVTWPVRFARDLLWSAHPQGRFRGRGRVGRRQSARDTPRGLWRCSACTYDNSVSTDICEMCSTAREDHDFSLRQYHQAGGTGELTVDEIRRRRLQRFSR

SEQ ID NO: 366766 - protein, 36 aa, Zea mays
  unsure (1)..(36): unsure at all Xaa locations
  Clone ID: MRT4577_97656C.1.pep
XYIVQLSSARLRRRXTLAGCIKLGSGARWCAGEPGL

SEQ ID NO: 366767 - protein, 74 aa, Zea mays
  unsure (1)..(74): unsure at all Xaa locations
  Clone ID: MRT4577_97657C.1.pep
EELPTEAKGQGALIPIPRGXKRSVEVVKFADEITAFRLYDKIPLDRINNRRLGAPQKKSSHTEKGHLKSSTRPL

SEQ ID NO: 366768 - protein, 90 aa, Zea mays
  Clone ID: MRT4577_97658C.1.pep
ERQKPGDNAGKGITSKQILIGTIGDQVLALDKRYLDPRRSVNPTQQKYQSESADNAVTSVSYDEDQDDFDESADEDEYDDYDDEDDEIDS

SEQ ID NO: 366769 - protein, 155 aa, Zea mays
  unsure (1)..(155): unsure at all Xaa locations
  Clone ID: MRT4577_97659C.1.pep
PFVHLLFFRPSPSLLRPQVSNAKMVTKNMAKMPRFLMIIGIIISITIVSRTEALSLDVSELLHKGDDIPCALNQDCDHTKLSESSYDNYYKTDKSSWDSLGLDPNLLHINQISVGFVPAFREKKNPNSPEKSTASCSNPWPLWAITSVFHLXTRS

SEQ ID NO: 366770 - protein, 74 aa, Zea mays
  Clone ID: MRT4577_9765C.1.pep
NTRLACRSMSEHRARKMCVSTNRLWLCLQDALKDALLEKSELQSFAASDHNDLSACCNIVLTIVHCAHISYIHG

SEQ ID NO: 366771 - protein, 663 aa, Zea mays
  Clone ID: MRT4577_97660C.1.pep
MEGVKFSAKNSTVPDFGDRKNLGGGVDTSAGPGSAEIPTPRRSSRRKACADANNILNSPKKKSRTPKDWFSNATSSSNKVVDDNVAHADGHVSEPHVSSKTDNQDSCVVNEGNKRNTKTTCDPPAEKPWNTGSFTYPDPEFFDFDKCRDVKLFAVDQIWALYDEFDAMPRFYARIRHVNTTNFRVKYTWLEHSTVNDDEEKWIDNKLPVACGNFTLGNTEESQDPLMFSHMVSWVKGRKRGSYVIYPNIGEVWALYKGWSMQWVSDADSHRSYEYEVVEVLSNFTVEAGVTVIPLVKVKGFVSLFAPAKDKPSFVIPSSELLRFSHSIPFFRTVGNEKVGVPCGFLELDTVSLPSNLDVAFPPVDLDSCVATNRTMGSESVDLTDNTTPSHGNGRSAHKGNHRNAGKWRKQSVQTQQHNARLASMSGYSAPQVCASTSVFTYPDSLFYNFEEDRSYNKFERGQIWALYSDFDGLPKYYGWVTKVDSDPFGVHLTWLEACPRSEHENTWLEHDLPVSCGTFKLHNWRMKYDINDAFSHVVETQGGSKRNFEIHPEVGEIWAIYHNWSPGWVPSKDTCEYAIGEITERNEASTKVLFLTQVDGYKTVFKPDNERSILEVPTKDDLLFSHRIPSFQLTTEKGGELCGFYELDPAAIPDSFLSAGTH

SEQ ID NO: 366772 - protein, 52 aa, Zea mays
  Clone ID: MRT4577_97661C.1.pep
MSIWASSSLVAIRRARQRVFWAGVDALECVEEQSRSRRLVGGGNQSRIQGVS

SEQ ID NO: 366773 - protein, 109 aa, Zea mays
  unsure (1)..(109): unsure at all Xaa locations
  Clone ID: MRT4577_97662C.1.pep
REAPILCHRGSPCHRGSPSRSRDEEKLLFCLSRNKDVFAWSALDLVRVSHSIIEHSLGIDSLVRLKSNDCRTCQMTKLKQPRPRCTAYGSQVNRTNCLSHWLATXDGLE

SEQ ID NO: 366774 - protein, 68 aa, Zea mays
  unsure (1)..(68): unsure at all Xaa locations
  Clone ID: MRT4577_97663C.1.pep
SPCLIVLIHSTMYKSSEAHYMQAESMRSALEKWHVMLKDYLVSAVHVHAXYERSYRTSNVSYDITSAD

SEQ ID NO: 366775 - protein, 75 aa, Zea mays
  Clone ID: MRT4577_97664C.1.pep
ISKSYYKTTKKGPYGRKKKTFKKRAKLLRYKTLKYFMELRNLTPTGKRQKKKRMGQKNWPADGERLEQRQGGRGV

SEQ ID NO: 366776 - protein, 104 aa, Zea mays
  Clone ID: MRT4577_97665C.1.pep
RFTVSHPPRNPPRINSRNPTLRPPPSSVFKIPASMVPQLAPNPQWTGSAPTTGLRYARSGLRIEHAGRQPGPARRFPAVVPDHSGCTAKSQASCPMWLCSSSTL

SEQ ID NO: 366777 - protein, 144 aa, Zea mays
  Clone ID: MRT4577_97666C.1.pep
MATTNHRIVPLLLVAATLLAPAAACPYCPTPKPPPPPPPSSSTPCPPPPYSPSPSTPTGKCPVNTLKLLACVDALNGLVHAVIGTKASDTCCPLLSGVADLDAALCLCTTIKAKALSVSLVLPVAISVLVNECGKHVPSSFQCP

SEQ ID NO: 366778 - protein, 146 aa, Zea mays
  Clone ID: MRT4577_97667C.1.pep
MATMTNHRIVPLLLVAATLLAQAAACPYCPTPKPPPPPPPPSSSTPCPPPPYSPSPSTPTGKCPVNTLKLLACVDALNGLVHAVIGTKASDTCCPLLSGVADLDAALCLCTTIKAKALSVSLVLPVAISVLVNECGKHVPSSFQCP

SEQ ID NO: 366779 - protein, 158 aa, Zea mays
  Clone ID: MRT4577_97668C.1.pep
QIPSLFIFLFLENYGVRKLEAFFAVLIATMAVSFAVMFGETKPSGKELLIGLVVPKLSSKTIKQAVGIVGCIIMPHNVFLHSALVQSRKIDTNKKSRVLEAVYYYNIESILALIVSFFINICVTTVFAKGFYGSKQADSIGLENAGQYLQEKYGTAFF

SEQ ID NO: 366780 - protein, 145 aa, Zea mays
  Clone ID: MRT4577_97669C.1.pep
MATMTNHRIVPLLLVAATLLAQAAACPYCPTPKPPPPPPPSSSTPCPPPPYSPSPSTPTGKCPVNTLKLLACVDALNGLVHAVIGTKASDTCCPLLSGVADLDAALCLCTTIKAKALSVSLVLPVAISVLVNECGKHVPSSFQCP

SEQ ID NO: 366781 - protein, 104 aa, Zea mays
  unsure (1)..(104): unsure at all Xaa locations
  Clone ID: MRT4577_9766C.1.pep
VRPAVTVPAAVPVPEAPAPTTVVVPPLPPVEVGREPATSSTAASSDGAASSRVHRCSAARAGEXNLPAVPEFVFRCGKPGKMWEEDEEVQSPLAFKKPRLLMTA

SEQ ID NO: 366782 - protein, 179 aa, Zea mays
  unsure (1)..(179): unsure at all Xaa locations
  Clone ID: MRT4577_97670C.1.pep
KKKKKKKKKKKKKISSSPPSHEVCAPPHSPXPVSAPDPPPPPTPSXPPREFGSRRTMPLXSLPPPTIGPRPGRCRRPSXTAVCSPCPRPLPPLSSSLLPPSPAXSSPPPRVLLSPQPLSTASSSXFSAPRSTPAXPTTLAAPPPSSSTTPLLAPSSSASAPTFSVVGEGKAKEEEEPSV

SEQ ID NO: 366783 - protein, 131 aa, Zea mays
  Clone ID: MRT4577_97671C.1.pep
RIANSFPEKISTNASLGLKIAVLCFIFLFLENYGVRKLEAFFAVLIATMAVSFAVMFGETKPSGKELLIGLVVPKLSSKTIKQAVGIVGCIIMPHNVFLHSALVQSRKIDTNKKSRVLEAVYYYNIESILA

SEQ ID NO: 366784 - protein, 145 aa, Zea mays
  Clone ID: MRT4577_97672C.1.pep
MATMNHRIVPLLLVAATLLAQAAACPYCPTPKPPPPPPPSSSSTPCPPPPYSPSPSTPTGKCPVNTLKLLACVDALNGLVHAVIGTKASDTCCPLLSGVADLDAALCLCTTIKAKALSVSLVLPVAISVLVNECGKHVPSSFQCP

SEQ ID NO: 366785 - protein, 516 aa, Zea mays
  Clone ID: MRT4577_97673C.1.pep
MASSDLAESLLPGGGGGASASHDEYEERAYDSEDKISIAVSDSDGEDDGAPASRPPFSWRKLWRFTGPGFLMCIAFLDPGNLEGDLQAGAAAGYQLLWLLLWATIMGALMQLLSARLGVATGKHLAELCRQEYPPWATRALWAMTELALVGADIQEVIGSAIAIKILSGGAVPLWGGVVITALDCFIFLFLENYGVRKLEAFFAVLIATMAVSFAVMFGETKPSGKELLIGLVVPKLSSKTIKQAVGIVGCIIMPHNVFLHSALVQSRKIDTNKKSRVLEAVYYYNIESILALIVSFFINICVTTVFAKGFYGSKQADSIGLENAGQYLQEKYGTAFFPILYIWAVGLLASGQSSTITGTYAGQFVMGGFLNLRLKKWLRAMITRSFAIIPTMIVALFFDTEDPTMDILNEALNVLQSIQIPFALIPLITLVSKEQIMGSFVIGPITKVISWIVTVFLMLINGYLILSFYITDVRGALLRSSLCVVLVVYLAFIVYLIVRNTSLYSRLCSSTSKSS

SEQ ID NO: 366786 - protein, 176 aa, Zea mays
  Clone ID: MRT4577_97674C.1.pep
WWCRGRARRRGRPRRRAAGSTDAWADAWADAWADAWDRIVPLLLVAATLLAQAAACPYCPTPKPPPPPPPSSSSTPCPPPPYSPSPSTPTGKCPVNTLKLLACVDALNGLVHAVIGTKASDTCCPLLSGVADLDAALCLCTTIKAKALSVSLVLPVAISVLVNECGKHVPSSFQCP

SEQ ID NO: 366787 - protein, 67 aa, Zea mays
  unsure (1)..(67): unsure at all Xaa locations
  Clone ID: MRT4577_97675C.1.pep
LEMCLSLSVLIDSSEEQWMREALPADESPCERRCYDRLRDSDDPAHADHESEPGHGDVXPDFALENL

SEQ ID NO: 366788 - protein, 36 aa, Zea mays
  unsure (1)..(36): unsure at all Xaa locations
  Clone ID: MRT4577_97677C.1.pep
LRYPLYSVNNXITXLCFALIPSRRQSNDLXAVESCE

SEQ ID NO: 366789 - protein, 87 aa, Zea mays
  Clone ID: MRT4577_97678C.1.pep
MRAEQEQEEQPAVVQKVIDMRGPQAWVLTDLKGLNEEQEMEANDVPMPELQYNVRLLVDEARADIVRLDAQLRREQEKVASLVRERE

SEQ ID NO: 366790 - protein, 71 aa, Zea mays
  Clone ID: MRT4577_97679C.1.pep
RHPTHMASLDEIASAQASILMPCPSICQSLTRIFSLCICSPVSDYDPTCVSTNPIIPMLVANCSHYSMRTL

SEQ ID NO: 366791 - protein, 146 aa, Zea mays
  unsure (1)..(146): unsure at all Xaa locations
  Clone ID: MRT4577_9767C.1.pep
EDLSDKTMKITLWADXAIMVKLHDVYDANTNKPILVLFVGCLPKFFKGVYLSGGPACRWYFNPTIPEAEPYLTSQSTKRIVLQLPQNLQHPPAMETKPIVEHKSLYELLTVNPYDFPETGFECTITIAEIPAEHKWWFPSCTKCNK

SEQ ID NO: 366792 - protein, 112 aa, Zea mays
  Clone ID: MRT4577_97680C.1.pep
ALLPPVRKGQVSPFFCLFGCRGGGRFFPFFSNKQGSPPVPPVFFWPVGGKVSNFFDPAPPGDLFFNGFGGFLAKFPGALNRKNQGGLLFCFISPHSPGVGGFRAQKKWPYRP

SEQ ID NO: 366793 - protein, 55 aa, Zea mays
  Clone ID: MRT4577_97681C.1.pep
SCAQSLVLLRQEIAAHSQYPRIVSLICIYNHSINVQGHNKVYKLHNTRLCPVVYV

SEQ ID NO: 366794 - protein, 102 aa, Zea mays
  Clone ID: MRT4577_97682C.1.pep
GAESRWTPPRARSIVRTRVLSQGHMPTRGWLTRGTGGLDAEAQAALSQKSKTTAMIPDVEDVVVFAGAGTGDVDPLKRQMQLLGHDLHPDAVLLLPAVTRLQ

SEQ ID NO: 366795 - protein, 173 aa, Zea mays
  Clone ID: MRT4577_97683C.1.pep
MHIATCVWQEKAAPAGGMGGARVAGGGGGGEWGARAAAALVVAGRALNCAVSFVVFLALDVLDVVLCLAYKLADYAAEAEWRPCYCSAAAGPHVAQQLPPKPKVVRPRMHLQLEDVSDTLYARPSLLADATRAGGDGVAPAFTVSPAAIAALIREKTDRAPRAPRQAPRWSDC

SEQ ID NO: 366796 - protein, 232 aa, Zea mays
  unsure (1)..(232): unsure at all Xaa locations
  Clone ID: MRT4577_97684C.1.pep
DPSFCCAPPPTAAYPPPAAANFLPPQSTGYPPPASASLYPPVEGLLSPRNYPPPPPPAYPQFPAPNNTSYTSPAAATTTAYPLPPASCAACPAPPPAELTRYPSPLTAAYPPPPASCAACPAPPPPAQYTSYPPPPSTNYPPAPPSGYPPLALGPLPASNLAPPTSTYPPPPESGSAYSVYPRSATPGTLDRALPYYPAPPVGSYYPPXGHGISRSTARPXPSYYPPPSQYP

SEQ ID NO: 366797 - protein, 69 aa, Zea mays
  Clone ID: MRT4577_97685C.1.pep
MADWGPVIVATVLFVLLTPGLLCTLPGRGRVAEFGSMHTSGLSILIHAVLYFALVTIFLIAVGVHVYTG

SEQ ID NO: 366798 - protein, 89 aa, Zea mays
  Clone ID: MRT4577_97686C.1.pep
LPARPERTRRGRPRYARVRAGRASPPPRRPSPEQPPPGPSLRPPLLNRIRAARPPDSQCWAAPGSLAETRGILVRFLASASCGAAPRPR

SEQ ID NO: 366799 - protein, 254 aa, Zea mays
  unsure (1)..(254): unsure at all Xaa locations
  Clone ID: MRT4577_97687C.1.pep
MELTKFLAALAVFLPIVYGAPTAAANDLHPEILAAMKRDLGLDADAARVRVAREIQATEVIDQLRAKAGSAFGGAWLVDGEIKVAVTDEALTSEVTAAGATALVVDTPLEKLQEAQKAIDALNVPTTKRAEEAANGIASYYVDVAANKLVFEAISSGTAKAEELAKKVGLTEADYEIRTVEALPTTFATIRGGDAYYIGGGRCSVGFSVTTGFVSAGHCGRAGTAATTSGGTNIXTFSGSVFPGSGDFAFIRGS

SEQ ID NO: 366800 - protein, 49 aa, Zea mays
  Clone ID: MRT4577_97688C.1.pep
KEQFICTRFLLIYRSHIAMWDAISSWVRLSIRVRGSYTSSARRARDLCN

SEQ ID NO: 366801 - protein, 50 aa, Zea mays
  Clone ID: MRT4577_97689C.1.pep
LKPITVLTTVQLCGRSWRPSAASIRSGAPRADMAIPVWMDRRSGGAEREA

SEQ ID NO: 366802 - protein, 278 aa, Zea mays
  Clone ID: MRT4577_9768C.1.pep
SLPCAVTSMELLHAVIHGAATTTTTTTTTTTSSSATVTSGDEGAHLPQGWAKKKRSRRQRSEEENLALCLLMLSRGDRHRVQAPPPPVPSAEFRCSVCGKSFGSYQALGGHKTSHRVKLPTPPAAHVQLPAPPAVALLVEAPAPPPVTATPPPLPLVAVAVAVREPATSSTSDGAAASRVHRCSICHKEFPTGQALGGHKRKHYDGGVGSAAASTEVPGAPAETSPEVGSSPARAFDLNLPAVPEFVFRCGKPGKMWEEDEEVQSPLAFKKPRPLMTA

SEQ ID NO: 366803 - protein, 94 aa, Zea mays
  Clone ID: MRT4577_97690C.1.pep
CSGRDLTLSTPSRSAATQQRMPTEMVTAALDACLRDLGVDHGRSAEGALAIAGGWKPRLRRYRRCGRLPDGCGLRRGCGMRAAERAPRVCGRLL

SEQ ID NO: 366804 - protein, 176 aa, Zea mays
  unsure (1)..(176): unsure at all Xaa locations
  Clone ID: MRT4577_97691C.1.pep
MAAGSSTSAIMLLLAVALIAMRENADSFTITNNCCLTVWPARTPMSGGTHLNPGGKRIDDLPGATRSGLMRIRNDCSFKVNSESYQRLHCLGXKYALLSGHPPLTXLVQSSLIFRESXYYHIAYIDDYXSPCLFSCKNKVRVLRTPLXCPDTYHHPNDWKTHACGCNMNYQVIFCP

SEQ ID NO: 366805 - protein, 110 aa, Zea mays
  unsure (1)..(110): unsure at all Xaa locations
  Clone ID: MRT4577_97692C.1.pep
RAGYSQTTTTQLPQFFFSPKLASPNGHVSADPPARGHHASSPTPPPPRRPPRCSPGRXRPDAQXTTSRTSSSLTPAPPTASTTRRRPSRSTSPDAGTSTSDLTSSTTRGP

SEQ ID NO: 366806 - protein, 243 aa, Zea mays
  unsure (1)..(243): unsure at all Xaa locations
  Clone ID: MRT4577_97693C.1.pep
MIGVCLFDYNIYIENIFYFVVFFYVMYXYIFVKIFIVNIIIFYVDFFFIFFLLIXFNGLXLFMYIGIGIFFLIIYLXCFLFFFFVXYFLMHLFVIXFXXINIFIMIIYFFYFFCFFFILXCYXLFFFLIFFYCVIIIIFXFLIFYYIYFIIFYIXXIIYVXMVCFFXFYYYLFXFFFCFCKFIFLCYFFXCFFFFFILFYYLLFIFXFLVFFCFLFVSFFYFFCFLFILFFLFLFXFCIFYFF

SEQ ID NO: 366807 - protein, 67 aa, Zea mays
  Clone ID: MRT4577_97694C.1.pep
FHIRQTTRRAKSNQRPDGWVHRSARPVEGRPTGERVRKPAPARDRPPEEGAGVGVELGCVRRRIGEG

SEQ ID NO: 366808 - protein, 62 aa, Zea mays
  Clone ID: MRT4577_97695C.1.pep
LRHLYVTFYHVSHTQERDPTHSTNFILMKASSPSPTASKISYLSVDQPSRIPPESYRVRGLL

SEQ ID NO: 366809 - protein, 64 aa, Zea mays
  Clone ID: MRT4577_97696C.1.pep
LVLWFLVFLFFFMEEVMLFGSTDKNHFLLGGHLKKVLTGDTGVHRPQSMLVDAWVWWGPGSTQD

SEQ ID NO: 366810 - protein, 131 aa, Zea mays
  unsure (1)..(131): unsure at all Xaa locations
  Clone ID: MRT4577_97697C.1.pep
MNKIYRAVPGVKLKMTLGLPVGVVMHCADNSDVRNLYILAVKXFDALLNPLPADGDDDMIMTTVKKSTTELPKKXVHPVDIVRQSKPCIRLDGVFLYFNDNAGDIDNHNDEMKGSLITYLIVNKAAELWTR

SEQ ID NO: 366811 - protein, 842 aa, Zea mays
  unsure (1)..(842): unsure at all Xaa locations
  Clone ID: MRT4577_97698C.1.pep
MKNLHKLLKGEHVIGLTNVQFEKDRPCVACQAGKQVGSSHHTKNVMTTSRPLEMLHMDLFGPVTYLSIGGSKYGLVIVDNFSRFTWVFFLQDKSETQGTLKRFLRRAQNEFELMVKKIRSDNGSKFKNLQVEEYLEEEGIKHEFSAPYTPQQNGVVERKNRTLIDMARMMLGEFKTPERFWSEAVNTXCHAINRVYLHRLLKKTSXFGSKCYILVKKGRNSKFAPKAVEGFLLGYDSNTKAYRVFNKSSGLVEVSSDVVFDETNGSPREQVVDFDDVDEEEVPTAAIRTMAIGDVRPQEQDEQDQPSSSTFVHPPTQDDEHETCDQGGAQDDHPFRVEEALLDPDWVLAMQEELNNFKRNEVWTLVPRPKQNVVGTKWVFRNKQDEHRVVTRNKARLVAKGYAQVAGLDFEETFAPVARLESIRILLAYAAHHSFRLFQMDVKSAFLNGPIKEEVYVEQPPGFEDERYPDHVCKLSKALYGLKQAPRAWYECLRDFLIANSFKVGKADPTLFTKTCDGDLFVCQIYVDDIIFGSTNQKSCEEFSRVMTQKFEMSMMGELSYFLGFQVRQLKDGTFISQTKYTQDLIKRFGMKDAKPAKTPMGTDGHTDLNKGGKSVDQKAYRSMIGSLLYLCASRPDIMLSVCMCARFQSDPKECHLVVVKRILRYLVATPCFGIWYPKGSTFDLIGYSNFDYAGCKVDRKSTSGTCQFLGRSLVSWSSKKQTSVALSTAEAEYVAAGQCCMQLLWMRQTLRDFGYNLSKVPLLCDNESAIRMADNPIEHSRTKHIDIRHHFLRDHEQKRDIEVFHVSSENQLADIFTKPLDEQTFCKLRTELNVLDSRNLD

SEQ ID NO: 366812 - protein, 750 aa, Zea mays
  Clone ID: MRT4577_97699C.1.pep
LSSRKTGGKLSSYQKCDDHIKTDKTETQGTLKRFLRRAQNEFELKVKKIRSDNGSEFKNLQVEEYLEEEGIKHEFSAPYTPQQNGVVERKNRTLIDMARTMLGEFKTPERFWSEAVNTACHAINQVYLHHLLKKTSYELLTGNKPNVSYFRVFGSKCYIIVKKGRNSKFAPKAVEGFLLGYDSNTKAYRVFNKSSGLVEVSSDVVFDETNGSPREQVVDLDDVDEEDVPTAAIHTMAIGDPFKVEEALLDPDWVLAMQEELNNFKRNEVWTLVPRPKKNVVGTKCVFRNKQDEHGVVTRNKARLVAKGYAQVAGLDFEETFAPVARLESIRILLAYAAHHSFRLFQMDVKSAFLNEPIKEEVYVEQPPAGFEDERYPDHVCKLSKALYGLKQAPRAWYECLRDFLIANAFKVGKADPTLFTKTCDGDLFVCQIYVDDIIFGSTNQKSCEEFSRVMMQKFEMSMMGELNYFLGFQVKQLKDGTFISQTKYTQDLLKRFGMKDAKPAKTPMGTDGHTNLNKGGKSVDQKAYRSMIGSLLYLCASRPDIMLSVCMCARFQSDPRECHLVAVKRILRYLVATPCFGIWYPKGSNFDLIGYSDSDYAGCKVDRKSTSGTCQFLGRSLVSWNSKKQTSIALSTTEAEYVAAGQCCAQLLWMRQTLRDFGYNLSKVPLLCDNESAIRIAENPVEHSRTKHIDIRHHFLRDHQQKGDIEVFYVSTENQLADIFTKPLDEKTFCRLRSELNVLDSRNLD

SEQ ID NO: 366813 - protein, 179 aa, Zea mays
  Clone ID: MRT4577_9769C.1.pep
GRVGSSYQALGGHKTSHRVKLPTPPPPPTAAAVTVSAAVPVPEAPAPITVVVPPLPPVEVGREPATSSTAASSDGAASSRVHRCSVCHKEFPTGQALGGHKRKHYDGGVGSAAASTDVPAAPAETSAEVGSSAARAFDLNLPAVPEFVFRCGKPGKMWDEDQEVQSPLAFKKPRLLMTA

SEQ ID NO: 366814 - protein, 50 aa, Zea mays
  Clone ID: MRT4577_976C.1.pep
ICSVPIRALPDVAVPVRRNKSRIYQKDSVNGTRRKRSRVALNTQVAADVG

SEQ ID NO: 366815 - protein, 294 aa, Zea mays
  Clone ID: MRT4577_97700C.1.pep
MAPSNLPSVMNATSQDIETLLAAQCHLGSKNLQVHMENYLWKTRQDGVNVINVGKTWEKIVLAARVIAAIDNPADICVISARPYGQRAVLKFAAHTGATAIAGRFTPGSFTNYITRSFKEPRLIIVTDPRTDAQAIKEASYVNIPVIALADTDSPTEYVDVAIPTNNKGRHAIGAVWWMLAREVLRLRGTIYNRETPWDVMVDLYFYRDPEAEAEDKVEEEKVPGADEEGPAAIESGFQASAGADWEAPASGFAGASGAAGAPGWDGAAGEEWGAAPANTEWAASAEPPKESQW

SEQ ID NO: 366816 - protein, 1182 aa, Zea mays
  unsure (1)..(1182): unsure at all Xaa locations
  Clone ID: MRT4577_97701C.1.pep
MDPKGKGIVINDKKKESFVNEPKDDKPTDSGLGHKRKDGKKKKTRRIKEIIYYDDNDESTSSHKDNDDNDYDKRKTVNSNFSFDYSRIPHSSNAHLLSIPLGKPPHFDGEDYGFWSHKMDEYHKVSGLDNAKQIWDTLKISHEGNDVTLLTKMELVEGELGRFAMIRGEEPTQTYNRLKTLINKIRSYGSTRWMDHDVVRLMLRSFTVLDPHLVNNIRENPRYTKMSPEEVLGKFVSGRMMIKEARYVDDALNGPINEPQPFALKATRSKEALPSKVAQVEAAGLSDEEMALIIKRFKTALKGHKGQPSKTKTKGKHSCFKCGKIGHFIANCPDNDSDQEQGNKREKKKTYKKAKGEAHLGKEWDSDCSSSDSDNEGLAATAFNKSSLFPNERHTCLMAKEKKVYASGGSSWIIDSGCTNHMTGEKKMFTSYVKNKDSQDSIIFGDGNQGKDKSETQGTLKRFLRRAQNEFELKVKKIRSDNGSEFKNXQVEEFLEEKGIKHEFSAPYTPQQNGVVERKNRTLIDMARTMLGEFKTPECFWSEAVNTACHAINRVYLHRLLKKTSYELLTGNKPNVSYFRVFGSKCYILVKKGRISKFTPKVVEGFLLGYNSNTKAYRVFNKSSGLVEVSSDVVFDETNGSPREQVVDLDDVDDEDVPTAAIRTMTIGDVRPREQLEQDQPSSSTMVHPPTQDDEQVHQKEACDQWGAQDDHVMEEEAQPTPPTQVRAVIQRDHPVDQILGDISKGVTTRSRLVNFCEHYSFVSSIEPFRVEEALLDPDWVLAMQEELNNFKRNEVWTLVPRPKQNVVGTKWVFRNKQDEHGVVTRNKARLVAKGYAQVAGLDFEETFAPVARLESIRILLAYAAHHSFRLYQMDVKSAFLNGPIKEEVYVEQPPGFEDERYPDHVCKLSKALYGLKQAPRAWYECLREFLIANAFKVGKADPTLFTKTCDGDLFVCQIYVDDIIFGYTNQKSCKEFSRVMTQKFEMSMLGELNYFLGFQVKQLKDGTFISQTKYTQDLLKRFGMKDAKPAKTPMGTNGHTDLNKGSKSVDQKAYRSMIGSLLYLCASRPDIMLSVCMCARFQSDPKECHLVAVKRILRYLVATPCFGIWYPKGSNFDLIGYSDSDYAGCKVDRKSTSGTCQFLGRSLVSWNSKKQTSVALSTAEAEYVAAGQCCAQLLWMR

SEQ ID NO: 366817 - protein, 911 aa, Zea mays
  Clone ID: MRT4577_97702C.1.pep
KDRKVIARKLGAKCKGDKTCIWVPKTIVTNLVGPNKSWVYASGGSSWIIDSGCTNHMTGEKKMFTSYVKNKDSQDSIIFGDGNQGKDKSETQGTLKRFLRRAQNEFELKVKKIRSDNGSEFKNLQVEEFLEEEGIKHEFSAPYTPQQNGVVERKNRTLIDMARTMLGEFKTPECFWSEAVNTACHAINRVYLHRLLKRTSYELLTGNKPNVSYFRVFGSKCYILVKKGRNSKFAPKAVEGFLLGYNSNTKAYRVFNKSSGLVEVSSDVVFDETNGSPREQVVDCDDVDEEDVPTAAIRTMAIGEVRPQEQDERNQPSSSTTVHPPTQDDEQVHQKETCDQGGAQDDHVMEEEAQPAPPTQVRAMIQRDHPVDQILGDISKGVTTRSRLVNFCEHYSFVSSIEPFRVEEALLDPDWVLAMQEELNNFKRNEVWTLVPRPKQNVVGTKWVFRNKQDEHGVVTRNKARLVAKGYAQVAGLDFEETFAPVARLESIRILLAYAAHHSFRLYQMDVKSAFLNGPIKEEVYVEQPPGFEDERYPDHVCKLSKALYGLKQAPRAWYECLRDFLIVNAFKVGKADPTLFTKTCDGDLFVCQIYVDDIIFGSTNQKSCEEFSRVMTQKFEMSMMGELNYFLGFQVKQLKDGTFISQTKYTQDLLKRFGMKDAKPAKTPMGTDGHTDLNKGGKSVDQKAYRSMIGSLLYLCASRPDIMLSVCMCARFQSDPKECHLVAVKRILRYLVATPCFGLWYPKGSTFDLVGYSDSDYAGCKVDRKSTSGTCQFLGRSLVSWNSKKQTSVALSTAKAEYVAAGQCCAQLLWMRQTLRDFGYNLSKVPLLCDNESAIRMAKNPVEHSRTKHIDIRHHFLRDHQQKGDIEVFHVSTENQLDDIFTKPLDEKTFCRLRSELNVLDSRNLD

SEQ ID NO: 366818 - protein, 251 aa, Zea mays
  Clone ID: MRT4577_97703C.1.pep
YAAELVEYVRTFLERTHERCRASYMEAVLEKQSYILLSRSDVESLMRLDPANASLQKSFGQLDNDIPDAGIEVEIELSDLLLDMCPIKQENLIHDDQKLILLASLSDSLEYLADSVERLGESFISPSTISENKSDIHQSHHTRTSSAIPKSLASLANEYRRLATDCVRVLRLEMQLETIYHMQDMTKREYVEDQDAEDPDDFIISLTTQIARRDKEMAPYIPESKRNYVFGGISSVAANASIKALALMKSI

SEQ ID NO: 366819 - protein, 965 aa, Zea mays
  Clone ID: MRT4577_97704C.1.pep
MASSAKRNHAFLYHDRRHAGNAYNDFDSHVYDSHAMFASSSSYKHDRDMCRRNVVHMPRRNSAHVPRKVVNKPSTIYYACNAPFAICRKGKKVYASGGSSWIIDSGCTNHMTGEKKMFTSYVKNKDSQDSIIFGDGNQGKDKSETQGTLKRFLRRAQNEFELKVKKIRSDNGSEFKNLQVEEFLEEEGIKHEFSAPYTPQQNGVVERKNRTLIDMARTMLGEFKTPERFWSEAVNTACHVINRVYLHRLLKKTSYELLTGNKPNVSYFRVFGSKCYILVKKGRNSKFAPKAVEGFLLGYDSNTKAYRVFNKSSGLVEVSSDVVFDETNGSPREQIVDCDDVDEEEVPTAAIRTMAIGEVRPQEQDERDQSSSSIMVHPPTQDDEQVHQKEACDQGGAQDDHVMEEEAQPAPPTQVRATIQRDHPVDQILGDISKGVTTRSRLVNFCEHYSFVSSIEPFRVEEALLDPDWVLAMQEELNNFKRNEVWTLVPRPKQNVVGTKWVFRNKQDEHGVVTRNKARLVAKGYAQVAGLDFEETFAPVARLESIRILLAYAAHHSFRLFQMDVKSAFLNGPIKEEVYVEQPPGFEDERYPDHVCKLSKALYGLKQAPRAWYECLRDFLIVNAFKVGKADPTLFTKTCDGDLFVCQIYVDDIIFGSTNQKSCEEFSRVMTQKFEMSMMGELNYFLGFQVKQLKDGTFISQTKYTQDLLKRFGMKDAKPAKTPMGTDGHTDLNKGGKSVDQKAYRSMIGSLLYLCASRPDIMLSVCMCARFQSDPKECHLVAVKRILRYLVATPCFGLWYPKGSTFDLVGYSDSDYAGCKVDRKSTSGTCQFLGRSLVSWNSKKQTSVALSTAEAEYVAAGQCCAQLLWMRQTLRDFGYNLSKVPLLCDNESAIRMAENPVEHSRTKHIDIRHHFLRDHQQKGDIEVFHVSTENQLADIFTKPLDEKTFCKLRSELNVLDSRNLD

SEQ ID NO: 366820 - protein, 1600 aa, Zea mays
  Clone ID: MRT4577_97705C.1.pep
MDPKGKGIVINDKEKESFVNEPKDDKSNDSGSGHRRKDGKKKKTRRIKEIVYYDSDESTSSHKDDDNDYRKTVNSNFSFDYSRIPHSSNSHLLSIPLGKPPHFDGEDYGFWSHKMRSHLFSLHPSIWEIVESGMKFDSSDSPMFINEQIHKNAQATTVLLASLCRDEYNKVSGLDNAKQIWDTLKISHEGNDITMLTKMELVEGELGRFAMIRGEEPTQTYNRLKTLINKIRSYGSTRWTDHDVVRLLLRSFTILDPHLVNNIRENPRYTKMSPEEVLGKFVSGRMMIKEARYVDDALNGPINEPQPLALKATRSKEALPSKVAQIEAAGLNDEEMALIIKRFKTVLKGHKGQPSKTKTKGKRSCFKCGKIGHFIANCPDNDIDQEQGNKREKKKNYKKAKGEAHIGKEWDSDCSSDSDNEGLAATAFNKSSLFPNERHTCLMAREKKVSTRDSTYASSSDNESSDDDDIDYSYLFKGLDRSKIDKINELIDALNDMNRLLEKQEDLLYDEHDKFVEAQKSYALEVKRNEVLSSELSSCHENIATLKSVNDDLNAKLEKSSKLTSCVEHVVICTRSKDFNVDACSEHLECISKLNDEVASLNAQLKTSKSDLDKLKFARDAYTIGRHPSIKDGLGFKREVKNLTSHKAPISAKEKGKAPMATSVKKNHAFLYHDRKNSRNAFRRYDAFDSHAYDSYAMTASSSHVVHDRKVGRRNVVHNMPRRNVVNIPRKVNEPSTIYHALNASFAIYKNDRKVYASGGSSWIIDSGCTNHMTGEKKMFTSYVKNKDSQDSIIFGDGNQGKDKSETQGTLKRFLRRAQNEFELKVKKIRSDNGSEFKNLQVEEFLEEEGIKHEFSAPYTPQQNGVVERKNRTLIDMARTMLGEFKTPERFWSEAVNTACHAINRVYLHRLLKKTSYELLTGNKPNVSYFRVFGSKCYILVKKGRNSKFAPKAVEGFLLGYDSNTKAYRVFNKSSGLVEVSSDVVFDETNGSPREQVVDCDDVDEEDVPTVAIRTMAIGEVHQQEACDQGGAQDDRVMEEDAQPAPPTQVRAMIQRDHPVDQILGDISKGVTTRSRLVNFCEHYSFVSSIEPFRVEEALLDPDWVLAMQEELNNFKRNEVWTLVPRPKQNVVGTKWVFRNKQDEHGVVTRNMARLVAKGYAQVAGLDFEETFAPVARLESIRILLAYAAHHSFRLFQMDVKSAFLNGPIKEEVYVEQPPGFEDERYPNHVCKLSKALYGLKQAPRAWYECLRDFLIANAFKVGKADPTLFTKTCDGDLFVCQIYVDDIIFGSTNQKSCEEFSRVMTQKFEMSMMGELNYFLGFQVKQLKDGTFISQTKYTQDLLKRFGMKDAKPPKTPMGTDGHTDLNKGGKSVDQKAYRSMIGSLLYLCASRPDIMLSVCMCARFQSNPKECHLVAVKRILRYLVATPCFGLWYPKGSTFDLVGYSDSDYAGCKVDRKSTSGTCQFLGRSLVSWNSKKQTSVALSTAEAEYVAAGQCCAQLLWMRQTLRDFGYNLSKVPLLCDNESAIRMAENPVERSRTKHIDIRHHFLRDHQQKGDIEVFHVSTENQLADIFTKPLDEKTFCRLHSELNVLDSRNLD

SEQ ID NO: 366821 - protein, 1595 aa, Zea mays
  Clone ID: MRT4577_97706C.1.pep
MDPKGKGIVINDKEKESFVNEPRDDKSNDSGSGHKRKDGKKKKTRRIKEIVYYDSDESSSSQKDDDHDYKKTVNSNFSFDYSRIQHSSNSHLLSIPLGKPPHFDGEDYGFWSHKMRSHLFSLHPSIWEIVENGMKFDSSDSPMLINEQIHRNAQATTVLLASLCREEYNKVSGLDNAKQIWDTLKISHEGNDITMLTKMELVEGELGRFAMIRGEEPTQTYNRLKTLINKIRSYGSTRWTDHDVVRLMLRSFTVLDPHLVNNIRENPRYMMMTPEEVLGKFVSGRMMIKEARYVDDALNGPLHEPQPIALKATRSKESLPSKVAQIEAAGLNEEEMALIIKRFKTVLKGRNGQPSKTKTKGKRSCFKCGKLGHFIANCPDNDSDQEKGNKREKKKHYKKAKGEAHLGKEWDSDCSSSDSDNEGLAATAFNKSALFPNEHHTCLMAREKKVITRNANTYDSSSDDESSEDEIDYSSLFKGLDRTKIAKINELIDALNEKDRTLEKQEDLLYEEHDKFVSAQNSLALEVKRNGILSCELSTCNETISSLKGEIKDLTTKLEVASNSYVENITICTRCKDFDVNACSEHLVSISKLSDEVASLNAQLKTSKSDFEKLKFARDAYTVGRHPSIKDGLGFKREAKNLTSHKAPIPAKEKGKAPMATSAKRNHAFLYHERRHTRNDVFDSHAYDSYAMTASSSHVMHDRRNVVHQMPRKNVVHNAPRKVYASGGSSWIIDSGCTNHMTGEKKMFTSYVKNKDSQDSIIFGDGNQGKDKSETQGTLKRFLRRAQNEFELKVKKIRSDNGSEFKNLQVEEFLEEEGIKHEFSAPYTPQQNGVVERKNRTLIDMARTMLGEFKTPECFWTEAVNTACHAINRVYLHRLLKKTSYELLTGNKPNVSYFRVFGSKCYILVKKGRNSKFAPKAVEGFLLGYDSNTKAYRVFNKSSGLVEVSSDVVFDETNGSPREQVVDLDDVDEEDVPTAAIRTMAIGDVRPQEQEEQDQPSSSTMVNPPTQDDEQVHQQEACDQGGAQDDLVVEEEAQPAPPTQVRAMIQRDHPVDQILGDISKGVTTRSRLVNFCEHYSFVSSIEPFRVEEALLDPDWVSAMQEELNNFKRNEVWTLVPRPKQNVVGTKWVFRNKQDEHGVVTRNKARLVAKGYAQVAGLDFEETFAPVARLESIRILLAYAAHHSFRLFQMDVKSAFLNGPIKEEVYVEQPPGFEDERYPDHVCKLSKALYGLKQAPRAWYECLRDFLIANAFKVGKADPTLFTKTCDGDLFVCQIYVDDIIFGSTNQKSCEEFSRVMTQKFEMSMMGELNYFLGFQVKQLKDGTFISQTKYTQDLLKRFGMKDAKPAKTPMGTDGHTDLNKGGKSVDQKAYRSMIGSLLYLCASRPDIMLSVCMCARFQSDPKECHLVAVKRILRYLVATPCFGLWYPKGSTFDLVGYSDSDYAGCKVDRKSTSGTCQFLGRSLVSWNSKKQTSVALSTAEAEYVAAGQCCAQLLWMRQTLRDFGYNLSKVPLLCDNESAIRMAENPVEHSRTKHIDIRHHFLRDHQQKGDIEVFHVSTENQLADIFTKPLDEKTFCRLRSELNVLDSRNLD

SEQ ID NO: 366822 - protein, 163 aa, Zea mays
  Clone ID: MRT4577_97707C.1.pep
PPFSERERFFFFGPGTPIFRGVGPWFPPRGVLGIRRTPDPSPPFSRSRGLFSPGAPPGVNGSFKTPPRFLLPPVILKKPTPLGGPPIRPRGPQVGQNNNEKNFFNPLAPWDFSFPPQLWANHEPGFKGGHKRGTAPKKSLGPGPNVFFFPKKKKKGGFFPGLG

SEQ ID NO: 366823 - protein, 1662 aa, Zea mays
  Clone ID: MRT4577_97708C.1.pep
MDPKGKGIVINDKEKESFVNEPKEDKPTDSGSGHRRREGKKKKTRRIKEIVYYDDSDESSSSQKDDDHNDYEQRKPVNSNFSFDYSRIPQSSNSHLLSIPLGKPPHFDGEDYGFWSHKMRSHLFSLHPSIWEIVDSGMHFNSSDSPIFINEQIHKNAQATTVLLASLCRDEYNKVSGLDNAKQIWDTLKISHEGNDATLLTKMELVEGELGRFAMIRGEEPTQTYNRLKTLINKIRSYGSTRWTDHDVVRLMLRSFTVLDPHLVNNIRENPRYTKMSPEEVLGKFVSGRMMIKEARYVDDALNGPINEPQPFALKATRSKEALPSKVAQIEAVGLNDEEMALIIKRFKTVLKGHKGQPSKTKTKGKRSCFKCGKIGHFIANCPDNDSDQEKGNKREKKKHYKKAKGEAHLGKEWDSDCSSSDSDNEGLAATAFNKSTLFPNERHTCLMAREKKVCTRNSTYASSSEDESSDDDEVDYSCLFKGLDRSKIDKINELIDALNEKNILLEKQEDLLYEEHDKFVEAQKSLALEIKRNEMLACEVSTCHDSISNLKSINDDLNAKLVEANKSNSCVEYVEICTRCKDIDINACSEHLVSISKLNDELASLNAQLKTSKSNFDKLKFARDAYTVGRHPSIKDGLGFKREVKNLTSHKAPISAKEKGKAPMASSTKKNHAFLYHDRSAYRGYNAYDDCDAHSSSFMHGRNMSRKNAMPRKNVIHAPRKVVNEPSTIYCALNASFVICRKDKKIVARKLGAKCKGDKTCIWVPKDICTNLVGPNMSWVYASGGSSWIIDSGCTNHMTGEKKMFTSYVKNKDSQDSIIFGDGNQGKIDLVQLVKQDKSETQGTLKRFLRRAQNEFELKVKKIRSDNGSEFKNLQVEEFLEEEGIKHEFSAPYTPQQNGVVERKNRTLIDMARTMLGEFKTPEYFWTEAVNTACHAINRVYLHRLLKKTSYELLTGNKPNVSYFRVFGSKCYILVKKGRNSKFAPKAVEGFLLGYDSNTKAYRVFNKSSGLVEVSSDVVFDETNGSPREQVVDCDDVDEEDVPTAAIRTMAIGDVRPQEQDERDQPSSSTMVHPPTQYIEQVHQQEACDQGGAQDDHMMEEEAQPAPPTQVRAVIQRDHPVDQILGDISKGVTTRSRLVNFCEHYSFVSSIEPFRVEEALLDPDWVLAMQEELNNFKRNEVWTLVPRPKQNVVGTKWVFRNKQDEHGVVTRNKARLVAKGYAQVAGLDFEETFAPVARLESIRILLAYAAHHSFRLYQMDVKSAFLNGPIKEEVYVEQPPGFEDERYPDHVCKLSKALYGLKQAPRAWYECLRDFLIANAFKVGKADPTLFTKTCDGDLFVCQIYVDDIIFGSTNQKSCEEFSRVMTQKFEMSMMGELNYFLGFQVKQLKDGTFISQTKYTQDLLKRFGMKDAKPAKTPMGTDGHTDLNKGGKSVDQKAYRSMIGSLLYLCASRPDIMLSVCMCARFQSDPKECHLVAVKRILRYLVATPCFGLWYPKGSTFDLVGYSDSDYAGCKVDRKSTSGTCQFLGRSLVSWNSKKQTSVALSTAEAEYVAAGQCCAQLLWMRQTLRDFGYNLSKVPLLCDNESAIRMAENPVEHSRTKHIDIRHHFLRDHQQKGDIEVFHVSTENQLADIFTKPLDEKTFCKLRSELNVLDSRNLD

SEQ ID NO: 366824 - protein, 1810 aa, Zea mays
  Clone ID: MRT4577_97709C.1.pep
MDPKGKGIVINDKEKESFVNEPKDDKSNDLGSGHRRKDGKKKKTRRIKEIVYYDSDESSSSQKDDDNNYRKTVNSNFSFDYSRIPHNSNSHLLSIPLGKPPHFDGEDYGFWSHKMRSHLFSLHPSIWEIVENGMKFDSSDSPMLINEQIHRNAQATTVLLASLCREEYNKVSGLDNAKQIWDTLKISHEGNDVTMLTKMELVEGELGRFAMIRGEDHLALTEPRDDKSNNSGSGHKRKDGKKKKTRRIKEIVYYDSDESSSSQKNDDHDKQRKPVNSNFSFDYSRIPHSSNSHLLSIPLGKPPHFDGEDYGFWSHKMRSHLFSLHPSIWEIVENGMKFDSSDSPMFINEQIHKNAQATTVLLASLCREEYNKVSGLDNAKQIWDTLKISHEGNDITMLTKMELVEGELGRFAMIRGEEPTQTYNRLKTLINKIRSYGSTRWTDHDVVRLMLRSFTVLDPHLVNNIRENPRYTMMTPEEVLGKFVSGRMMIKEARYVDDALNGPIHEPQPIALKASRSKEALPSKVAQIEAAGLNDEEMALIIKRFKTVLKGRNGQPSKTKTKGKRSCFKCGKLGHFIANCPDNESDQEKGNKREKKKHYKKAKGEAHLGKEWDSDCSSSDSDNEGLAATAFNKSTLFPNERHTCLMAREKKICTRNSTYASSSEDESSDEDEVDYSCLFKGLDRSKIDKINELIDALNEKNILLEKQEDLLYEEHDKFVEAQKSYALEVKRNEMLSFELSTCHETISTLKGVNNDLNAKLEVANKSNSCVEHVEICTRCKDVDINACSEHLVSISKLSDEVASLNARLKTSKSDFEKLKFARDAYTVGRHPSIKDGLGFKREAKNLTSHKAPIPAKEKGKAPMATSAKRNHAFLYHDKRQTRNRSYDAFDSYVYDSHAIKDRKVIARKLGAKCKGDKTCIWVPKEIVTNLVGPNKSWVYASGGSSWIIDSGCTNHMTGEKKMFTSYVKNKDSQDSIVFGDGNQGKEKSETQGTLKRFLRRAQNEFELKVKKIRSDNGSEFKNLQVEEFLEEEGIKHEFSVPYTPQQNGVVERKNRTLIDMARTMLGEYKTPECFWTEAVNTACHAINRVYLHRLLKKTSYELLTGNKPNVSYFRVFGSKCYILVKKGRNSKFAPKAVEGFLLGYDSNTKAYRVFNKSSGLVEVSSDVVFDETNGSPREQVVDCDDVDEEDVPTAAIRTMAIGEVRPQEQDERNQPSSSTMVHPPTEDDEQVPQVEALDQGGAQDNHVMEEEVQPAPPTQVRAMIQRDHPVDQILGDISKGVTTRSRLVNFCEHYSFVSSIEPFRVEEALLDPDWVLAMQEELNNFKRNEVWTLVPRPKQNVVGTKWVFRNKQDEHGVVTRNKARLVAKGYAQVAGLDFEETFAPVARLESIRILLAYAAHHSFRLYQMDVKSAFLNGPIKEEVYVEQPPGFEDERYPDHVCKLSKALYGLKQAPRAWYECLRDFLLANAFKVGKADPTLFTKTSDGDLFVCQIYVDDIIFGSTNQKSCEEFSRVMTQKFEMSMMGELNYFLGFQVKQLKEGTFISQTKYTQDLLKRFGMKDAKPAKTPMGTDGHTDLNKGGKSVDQKAYRSMIGSLLYLCASRPDIMLSVCMCARFQSDPKECHLVAVKRILRYLVATPCFGLWYPKGSTFDLVGYSDSDYAGCKVDRKSTSGTCQFLGRSLVSWNSKKQTSVALSTAEAEYVAAGQCCVQLLWMRQTLRDFGYNLSKVPLLCDNESAIRMAENPVEHSRTKHIDIRHHFLRDHQQKGDIEVFHVSTENQLADIFTKPLDEKTFCRLRSELNVLDSRNLD

SEQ ID NO: 366825 - protein, 330 aa, Zea mays
  Clone ID: MRT4577_9770C.1.pep
LPQGGLGRSGPDRPPRTVSPQRARARRPSNHRENKSQPNSPVSQRSLSLHYSTMSSMELLHAVVPEKQSEEEVAPAATTTSSSATATGGDEGAHVLQGWAKRKRSRRQRSEEENLALCLLMLSRGGHHRVQAPPTPVPSAAPAAAEFRCSVCGKSFSSYQALGGHKTSHRVKLPTPPPPPPPAVTVPAAVPVPEAPAPTTVVVPPLPPVEVGREPATSSTAASSDGAASSRVHRCSICHKEFPTGQALGGHKRKHYDGGVGSAAASTDVPAAPAETSAEVGSSAARAFDLNLPAVPEFVFRCGKPGKMWEEDEEVQSPLAFKKPRLLMTA

SEQ ID NO: 366826 - protein, 320 aa, Zea mays
  unsure (1)..(320): unsure at all Xaa locations
  Clone ID: MRT4577_97710C.1.pep
RSSLPEAVTPSRSLSRQPPPPPGGPPRRASPRPPPRRSSSSSXPPLAELERVRRVGSGAGGTVWMVRHRGTGRPYALKVLYGNHDDAVRRQITREIAILRTAEHPAVVRCHGMYEQAGELQILLEYMDQGSLESHRIADERFLAHVARQVLSGIAYLHRRHIVHRDIKPSNLLIDSGRRVKIADFGVGRILNQTMDPCNSSVGTIAYMSPERINTDLNDGTYDGYAGDIWSFGLSILEFYLGRFPFGENLGRQGDWAALMCAICYNDPPEPPPTASREFRGFIACCLQKNPAKRLTAAQLLQHPFVAGPHPQPLAAPPPS

SEQ ID NO: 366827 - protein, 45 aa, Zea mays
  Clone ID: MRT4577_97711C.1.pep
DRDPVTCCPRVSFPTTPRLGPGTLFVLFACSPYATIQQYKEPGIC

SEQ ID NO: 366828 - protein, 281 aa, Zea mays
  unsure (1)..(281): unsure at all Xaa locations
  Clone ID: MRT4577_97712C.1.pep
PDLRLCLLLPLFSHLPSPEAQTRRDATPRERDGSEPPESTRPRAAVTPGRFSPPDPILRTAEHPAVVRCHGVGEQAGELQILLEYMDGGSLENRRIADERFLAHVARQVLSGIAYLHRRHIVHRDIKPSNLLIDSGRRVKIADFGVGRILNQGXGPXNSSVGTIAYMSPERINTDLNDGAYDGYAGDIWSFGLSILEFYLGRFPLGENLGKQGDWAALMFAICYSDSADAXGRPCNASRDFKNFISLCLQKNPVNRPSAMRLLQHPFVAQPQPQPLAAPPS

SEQ ID NO: 366829 - protein, 86 aa, Zea mays
  unsure (1)..(86): unsure at all Xaa locations
  Clone ID: MRT4577_97713C.1.pep
SVANERKTRTGGASSRPKGGPPGGKPPHSQTAKRKTEKHHXRTSQATRTTKANARNDTPRAKQXRGPATGAKDDPNERGAGYQHST

SEQ ID NO: 366830 - protein, 55 aa, Zea mays
  Clone ID: MRT4577_97714C.1.pep
SRGSFEPGPPLRRPMHWQPGQCCLEPPLGCSPEHLRPSASHLPTDRAPICAEQRI

SEQ ID NO: 366831 - protein, 86 aa, Zea mays
  unsure (1)..(86): unsure at all Xaa locations
  Clone ID: MRT4577_97715C.1.pep
SETSTQTGGCSCGQQQSHEQQHQPQQHXPQKQQPQPPPQQNQQQHHQXQQAHMQPQKQDATQEVKXQQQHKQPEYXQQQQHGTNNN

SEQ ID NO: 366832 - protein, 215 aa, Zea mays
  Clone ID: MRT4577_97716C.1.pep
MSAQDPLSSTNPSSVTNNTQDASGRQPSSAAAGSSELSSAKISLRKSLRSFPDFPIPGINFVDIMPLFADPTAHATLVEALELQIAEAFPTKPDIIVGLDARGFLFGPGLALRLGVPFAAVRKQGKLPGPCVTAEYIKEYGKDLFQMQEDAVREGQKVLIVDDIIATGGSAKAAAELVQQLKGEVMGYLFILEIPGLNGRDKLGAPPTKILLEDA

SEQ ID NO: 366833 - protein, 65 aa, Zea mays
  Clone ID: MRT4577_97717C.1.pep
THSSAHSSTHSTFISTHPSSITVALFKNFTRLSISLYLSYNNINNHPHTNYNHIKPILPYIHNNT

SEQ ID NO: 366834 - protein, 90 aa, Zea mays
  unsure (1)..(90): unsure at all Xaa locations
  Clone ID: MRT4577_97718C.1.pep
QRPPPHYSPYNSKGDNKLNHPKHGLXKTICSPLPDKSIGVQKPLEICITTLINIQFTDKPPVTSPXIPSLPTQPPTRPPTLRGRWADAGR

SEQ ID NO: 366835 - protein, 111 aa, Zea mays
  Clone ID: MRT4577_97719C.1.pep
VNFFFLKQPERALPHAMRPSSEHIPRPGAPSSYWPRSLLSGGCSQPHSLFGSVGASMPWRPSSFDVLNTSLCACRLQCRGVDRESYATVGIDTYLLTLLGTHSNTLLLALD

SEQ ID NO: 366836 - protein, 626 aa, Zea mays
  Clone ID: MRT4577_9771C.1.pep
MATLVRPDHYQTEAALDTVAIFVHFCEMFVGVAACTSLFHQFFVLVRSGKGKDHLGAYYFQSRSNPTVTYIASLGGEAASELLVYRPQRHWYDPAWAWERSDLGGVGNFGEGTFCPRRPPCLPGGLVPIDIRLPGTSPTIHQQLPWMFLPRRPPMPTGETGPHQHTSAGNVTCDMSTATAAPSVSVPSPPSAATEGVPAASAPTVQDDAGTEVAPSGPQDSPVTVEATPLGSQVPARGPGVAVPPTTVADPTTAIPSDAPPVVGVGGAFDSVPQPPPKGPEVILGRPLRSGIEPGATLTPLPQRRTKAASCQFASQRAELEQEREDFKEDIWKVSDREEEVTRNERSLAKNKKHLDQKEEAVIALHDKLKAYNAVLEKQWDKQAAAEAKLQQELSDKASDITRVEGNLKAREASLAKRTTDLTWQEEDLTFREEMWARQNKLLDELELEAEEKVKRLEGEVRALEGQVRQFQAAQATQSALGPQAVEVLRKTLDDLRAEQRAGAQRIAAWAGEASTALVPLGMSPIPALVRPASIFDVLPILDSAANRLRRLDQVLGTRLEAEGGRLCRSAIKYVLTCFQSHDPTISLGPVIAGPVADTEDAAREGVQDVVDVVVGRFQRDPVDDE

SEQ ID NO: 366837 - protein, 55 aa, Zea mays
  Clone ID: MRT4577_97720C.1.pep
TILYHKLAIGIISVDNSPYIARDLIHPKEFIYREDITDYPRTSSLGTMDYQTFTE

SEQ ID NO: 366838 - protein, 105 aa, Zea mays
  unsure (1)..(105): unsure at all Xaa locations
  Clone ID: MRT4577_97721C.1.pep
LVRVQDSIRNSGLNQSVKFPTMFVSWISLPTCHLSADRASRWQWDTFMLFLGCIMTFVIXVPSTPKMFVAPSAPVKVGAFLISLVPGDKDLVLRHRAHGHGAWTT

SEQ ID NO: 366839 - protein, 82 aa, Zea mays
  Clone ID: MRT4577_97722C.1.pep
VDAFPENHLPYADRLLLNRSSDRDGEEGRLIRLKKATGPYAPSAAVLHTDGIRAPMTRPLRLCAITDCVLPIRHFFEHGPRS

SEQ ID NO: 366840 - protein, 60 aa, Zea mays
  Clone ID: MRT4577_97723C.1.pep
GLGDFFSILYKTGPIIGPRGHSIGGSPFNSHIQDMDPVYKSVSNKKPKFALFINITSSYG

SEQ ID NO: 366841 - protein, 60 aa, Zea mays
  Clone ID: MRT4577_97724C.1.pep
SHAFIRQLDLIHLLLFFFLLLPVSVCADSVSILLSRLCYGRSYLWSVAYVFLCVNIVTCM

SEQ ID NO: 366842 - protein, 79 aa, Zea mays
  Clone ID: MRT4577_97725C.1.pep
KPPKDKLVPKGNSINNVSQEAAQIPQLCPVKNKEIRKFPAGIYVQTKENIVALKQRAPQKIQFYHRYYSIPRKMASGSF

SEQ ID NO: 366843 - protein, 1214 aa, Zea mays
  Clone ID: MRT4577_97726C.1.pep
MWSRSELVVVVGLVASFLFSMESGCFLIWNVRGLNNRAKRDFVKSLVVSLKPAVICLQETKMCSVSDFDILSILGSGYSNFVYGPAHGSRGGLLVAWHDGSFASVASVVKDNSVSVQLKSVSGPLWWFTGVYGPYQDSLKPAFLQELRDIRNACVGPWIIAGDFNQIYKSEDKNNSNVNRALLGNFRDLINSLDLKEIPLNGRRFTWSNQRENPTLVKLDHVFCSTCWEEAFPDCFLYSSASETSDHCPLILKLSLDLKGKRRFHFESFWPKLPGFMEEVAASWDQPVQASCPFERVSIKFKRLARRLQSWGHNAVGNVSSQLGVAREVLHRMEMAQDSRVLSSEEVWLLRKLKQHCLVLASLERTVARLRSRVHYLREGDANTKFFHLQARHRKKRNFISHLEDEGRLVTSHDQMQEVLDDFFSNLLGSIVQRPFTLDLASCHRDAIDLSLLEAPFSEKEVQDTIGALPSDKAPGPDGFTGRFYKRCWHIIKSDLLAAINSLHQGNAYKLGLLNSAFIALLPKKIDALTARDFRPISLIHSFAKLVTKMLANRLGPHLQELVAANQSAFVRGRSIHDNFMLVQHSIKSLHKKKVSSLFLKLDISKAFDSVSWAFLTEVLSHLGFGPVWRSMISNLLTSSSTQVLLNGSPGIPIKHRRGLRQGDPLSPMLFVLVMDVLNSLFKLAENRGLLHRLEGANIRNRLSIYADDVVLFVQPFEEDLHCVRTILDCFGSASGLVSNLQKSYVIPIRCNQQAVQVGCNILQCSSSSFPCTYLGLPISDKKLRRNDLMVWVDKIADRLPNWKARLLNLAGRTAIVRFVLSAIPVYLLIAMNIPKWVINSIDKIRRGFLWKGRKEVTGGCCLVSWDIITRPLYLGGLGISNLLYQSWALQTKWLWLKKTDPNRPWVGLKFPIQQHVRRFFASSIITLVGDGSTTLFWTDRWLDGSCIHDLAPDVVASVGKRASSSRTVAHALENWQWVSDLETPLNLIGLQQYLQLWDALRGVVLTQEADRHVWIHSSSGQFSSRSCYKAFFMGSITFEPWKRLWESWAPPKCKFFLWLAIRNKCWTADRLQKRGLDHPEVCPLCDQEPENIQHLLCSCIFARQFWHCILAPLGLANLSPASIEISFAEWWRKVCKQVHKSKRRGINSVIIMGAWCLWIHRNKAVFEGVSPSISRIQKVFLEELECWGLAGAKHLEGLGLGAAIIRSREFLGE

SEQ ID NO: 366844 - protein, 85 aa, Zea mays
  unsure (1)..(85): unsure at all Xaa locations
  Clone ID: MRT4577_97727C.1.pep
GARGVSSLVVAVSFVGAPVLLVSVSVAGRVPAAVLLGFARPAVGVVRSRGFRCFSVCPLCFLVLVVVAAXCVCCWFRPPPFFFFL

SEQ ID NO: 366845 - protein, 103 aa, Zea mays
  Clone ID: MRT4577_97728C.1.pep
GQKPKPRRGGAHAHTHLGDPGARGKIDLAQKNREPPGNWGEQIHGGGKKNFGSPGNPNQERNLRLEFPRGKVLKDFPTKNKVKGQTGLPFFFPLVPGLKNKTF

SEQ ID NO: 366846 - protein, 72 aa, Zea mays
  Clone ID: MRT4577_97729C.1.pep
PLRVIYLLPKILDCFPSSRGVPGDPLFQIFFRNNIGGPPPIFVPVKLWPYQGRGPLGCKPQGNGWPSEKTLN

SEQ ID NO: 366847 - protein, 67 aa, Zea mays
  Clone ID: MRT4577_9772C.1.pep
IASNKGTCNTTYKLVRLRQLSWNSLAQSLHASLLVSYKYSILLAFGSKWRGGMDDIVLEKIKNYKYK

SEQ ID NO: 366848 - protein, 81 aa, Zea mays
  Clone ID: MRT4577_97730C.1.pep
SGVCRQPSCSDGEAATGFLNHHSRDEEQPVGEYGYSETEVVTATGEGEYERYKKEEKEHKHKQHLGEAGAIAAGAFALYEK

SEQ ID NO: 366849 - protein, 89 aa, Zea mays
  Clone ID: MRT4577_97731C.1.pep
PQKGGGGGGAKGPPIKLPPVWFLKGPRKGGFPPQPLFLKAKFFSKVPQKKIKAPGGPFFPPPKVSALVPPRVLKPKFDRKGLPRPPHFF

SEQ ID NO: 366850 - protein, 86 aa, Zea mays
  Clone ID: MRT4577_97732C.1.pep
VAIDGKDIRTLNLKSLRLKIGLVQQEPVLFASSILDNIAYGKEGASEEEVVEAAKTANVHGFVSQLPEGYRTAVGEQGMQLSGGQK

SEQ ID NO: 366851 - protein, 38 aa, Zea mays
  Clone ID: MRT4577_97733C.1.pep
FLRKNQWGPSFFRGEDNVFSFNRKLQNLKQVTKTNSNY

SEQ ID NO: 366852 - protein, 48 aa, Zea mays
  Clone ID: MRT4577_97734C.1.pep
LTNRCGSFLGGNAPPIPNCFAPLLRIEGSSLDPSSCLSRHSVSPDHLA

SEQ ID NO: 366853 - protein, 84 aa, Zea mays
  Clone ID: MRT4577_97735C.1.pep
CSRAGLAFLLLWLRSELAVAKFNSYRFQGGAWARSSYVIRRALLLLESESVVGHGNVIGSEAVAAARVGESPPPPPPRSLQELY

SEQ ID NO: 366854 - protein, 96 aa, Zea mays
  Clone ID: MRT4577_97736C.1.pep
WGCPVFDVVGRPHAPSLNPELQFFIGYASLFFCFVYFVCVVSLFCFCFLFNLPLCFLGLWCPGCSTCQRRGVIILRFWHNSEKLKKKKKKTKKKRG

SEQ ID NO: 366855 - protein, 71 aa, Zea mays
  Clone ID: MRT4577_97737C.1.pep
ITTSRSLTDVVASHTTSALMSLTLTSSDAHTQQLPARTGVCQLSCAFSLARARIQSPARARSLWSLRKQHH

SEQ ID NO: 366856 - protein, 150 aa, Zea mays
  unsure (1)..(150): unsure at all Xaa locations
  Clone ID: MRT4577_97738C.1.pep
HWVPRGRPIHRLLAPRSLPSLHVRVPLLSQISVNNRGQHVKRPHXDRYWRPTSRWRWAQASDSRATRCCTAWTLMLTLAYGSVNTTSHYLPDKCKQVVARIARELELVMMRTRPXCSEIVRHVSTMIRTNIMWRAAHLXIEFTIKLVRLR

SEQ ID NO: 366857 - protein, 112 aa, Zea mays
  Clone ID: MRT4577_97739C.1.pep
IGTSSRRVATKYSLPPSTYPYTRPLLIDLPPHRLISLLDASAFDTRSSTIRVEHAIDYADSALTYRAGLLCPPREKSSMAKMLCIEIPMSPCPPTKGNCILLRTGKMILQLS

SEQ ID NO: 366858 - protein, 102 aa, Zea mays
  unsure (1)..(102): unsure at all Xaa locations
  Clone ID: MRT4577_9773C.1.pep
AWVLHQLGVVHDXKNPNPVAIMLXEKLVQSGTQMVINKHYYMRLSATTNKLKSLGVDTACDSRDITRGELTHQKLWKRDDPWXDALGRKRIHIXTCNDRRAI

SEQ ID NO: 366859 - protein, 291 aa, Zea mays
  unsure (1)..(291): unsure at all Xaa locations
  Clone ID: MRT4577_97740C.1.pep
MEWPAAGASWQPVLAIGNSKKTEREKTVPKPTKPTVGSPQDDLKMAQYNIYKGEKRSLVKGRILHHLDFTDLEQCRDCIKGKFAKQIKKDAKHSTRVLEIIHTDICGPFPVRTVDGFNSFVTFTDDYSRYGYVYPVKEISEALDKFKQFKAEVENQHDLKIKIVRSDRGGEYCGHHTEYGXRKLTLNYFHIWXCPTEARIFNPGQEKLDERTTSYHFIGYPERSKCYRFYCPGRQTKFIETRHAIFLEDDMIKGSKESSHDSSSVTPSDALMQEPQNEPELETKFMKVSKV

SEQ ID NO: 366860 - protein, 95 aa, Zea mays
  Clone ID: MRT4577_97741C.1.pep
GTKPFMQKHFEFLLLSHAENGGYQENSSYVLILARVFHQFTYSLRFERVGTHTLQFGRGCQLANNFARTGNPWLYSLFTLGLFFKHGPFFLGWGP

SEQ ID NO: 366861 - protein, 215 aa, Zea mays
  Clone ID: MRT4577_97742C.1.pep
YGVRLDQTPANPETEITVPINIGLAVFDVIDDIKEGLEEPCPCTVLCADIVVYAARIVCSMLSNWRVRFAALDGLVYRVVYRAGDVQDYLLNSTLIVADLVRNFCPKNLIVVVLVILSGAHAVCFWHCSWLRARLSEMAAQIVHVFRDLLWAKCGADGPGADHIVPNNVRDEDPGALAAVFPKLLGKMHLTNDLLYNSYYHSIVTRIVTCNFLWE

SEQ ID NO: 366862 - protein, 630 aa, Zea mays
  unsure (1)..(630): unsure at all Xaa locations
  Clone ID: MRT4577_97743C.1.pep
LLSAAENQLAEVAKDAKSTKXDPNYCKVLSSTLSSIMGWTEKRLLAYHETFNTSNIESMQGIVSIGVSAARVLVEDISHEYRRRRKEETDVARSRVETYIRSSLRTAFAQRMEEADSKRSSRNPTPVLSILAKDISDLATKEKKLYSPILKTWHPLASGVAVATLHSCYGNELKQFVAGLTELTPDTVQVLKSADKLEXKDLVXIAVEDSVDSDDGGKSLIRESRHHEAENAIANLVKVWIKERVDRLKGWVDRNLKQETWNPGANRDNFAPSSVEMLRVIGETLDAFFQLPIPMHPALLPDLTVGLDRSLQLYVAKAKSGCGARNSFMPQLPPLTRCEVGSKLLFKKKEKPQNLQVRVSQNGASNGNDPLGLPQLCVRLNTLQYIRGEFENLEKKIKTSLRNVESAQADITDGLNIKFELCQAACQEGIQQICETTAYKVMFYDLGHVLWDTLYVGDTASNRVEVLLRELDPVLETVSSMVHNKVRNRAITALMKATFDGFLLVLLAGGPLRTFTRQDSQIIEDDFRALRDLYLADGDGLPEELVDKASSQVKNVLPLFRADSESLIERFKRMMVESNRPASKNRLPLPPTTGHWSPNEPNTVLRVLCYRNDETATKFLKKTYNLPKKI

SEQ ID NO: 366863 - protein, 274 aa, Zea mays
  Clone ID: MRT4577_97744C.1.pep
MPGAVALAPTLAAASSSAAAASTLAPNPTSRGDPLTIRLCRNAPASATPLVPLVATRRYVRGCRGAALVASPHHAPNPRLRFASAAEGMAAEASTAGAASAAEAKPFAVLFVCLGNICRSPAAEAVFRTLVSKRGLDSKFLIDSAGTIGYHEGNKADSRMRAASKKRGIEVTSISRPIKPSDFRDFDLILAMDRQNYEDILNSFERWRRKEPLPDSAPNKVKLMCSYCKHHTESEVPDPYYGGPQGFEKVLDLLEDACESLLDSIVANNASISG

SEQ ID NO: 366864 - protein, 127 aa, Zea mays
  unsure (1)..(127): unsure at all Xaa locations
  Clone ID: MRT4577_97745C.1.pep
CLFVASGGAAVPCAGCFPLFSVVLLLLSVLLRSVLLCLARRCSCPSVVSWALFGLVVXWCLLFLWVRSPSWGSCVRRLRFWALLARGALALGVGSPACACGALGRSGCGLFVGGGRFFSVFWVPPAP

SEQ ID NO: 366865 - protein, 173 aa, Zea mays
  unsure (1)..(173): unsure at all Xaa locations
  Clone ID: MRT4577_97746C.1.pep
RVDSKFLIDSAGTIGYHEGNKADSRMRAASKKRGIEVTSISRPIKPSDFRDFDLILAMDRQNXVVSQALLFVFQYLSEFVVICCLMHWSISVLNNXEDILNSFERWRRKEPLPDSAPNKVKLMCSYCKQHTESEVPDPYYGGPQGFEKVLDLLEDACESLLDSIVANNASISG

SEQ ID NO: 366866 - protein, 58 aa, Zea mays
  unsure (1)..(58): unsure at all Xaa locations
  Clone ID: MRT4577_97747C.1.pep
LSRKFFKIKDKYKICLYSMFVAIKSTXRRHLYQIKVLVMSLLLNHLFFSFGRIEKQQG

SEQ ID NO: 366867 - protein, 227 aa, Zea mays
  unsure (1)..(227): unsure at all Xaa locations
  Clone ID: MRT4577_97748C.1.pep
MTTARAGLTIASLAIPQGISYAKLASLPPIIGLYSSFVPPMVYAVLGSSRDLAVGPVSISSLIMGSMLRQAVSPTAEPTLFLQLAFTSTLFAGLVQASLGILRLGFVIDFLSKATLVGFMAGAAIIVALQQLKALLGIVHFTTEMGIVPVMASVFHHTSEWSWQTILMGVCFLVFLLSARHVSIRXAKLFWXVSACAPLASVTISXTLLGSPLQAQNHGISIIGAAQ

SEQ ID NO: 366868 - protein, 93 aa, Zea mays
  Clone ID: MRT4577_97749C.1.pep
VPHVREMHHRPIPAQMLEDSSPLAYACCCNEVSRTRPSLYWCICILSEGMCIAICIVFRQPHLLRESGCPIFLSGSIIVSFFCLLIFKIFCAS

SEQ ID NO: 366869 - protein, 81 aa, Zea mays
  Clone ID: MRT4577_9774C.1.pep
GGPAGSSCRTTRRRRLSPAPATGSPDLPSSTTTTWPTMPIPVLPFPPLVALVPYCVEHGDRNRFARVILVLFCVAARQSRA

SEQ ID NO: 366870 - protein, 662 aa, Zea mays
  unsure (1)..(662): unsure at all Xaa locations
  Clone ID: MRT4577_97750C.1.pep
MVGMRGAYGGACNDDSKSRLHGGKAAEPEIASMAVHKVAPPPARSTASKMKVRVKETFFPDDPFRAFKGQPPGTQWLMAVRYLFPILDWVPSYSLSLFKSDLVAGLTIASLAIPQGISYAKLASLPPIIGLYSSFVPPMVYAVLGSSRDLAVGPVSISSLIMGXPCCXAGREPHRGADAVPAAGLHXTLFAGLVQASLGILRLGFVIDFLSKATLVGFMAGAAIIVALQQLKALLGIVHFTTEMGIVPVMASVFHHTSEWSWQTILMGVCFLVFLLSARHVSIRWPKLFWVSACAPLASVTISTLLVFLFKAQNHGISIIGQLKCGLNRPSWDKLLFDTAYLGLTMKTGLVTGIISLTEGIAVGRTFASLKDYQIDGNKEMMAIGLMNVVGSCTSCYVTTGAFSRSAVNHNAGCKTAMSNVIMALTVMVTLLFLMPLFVYTPNVVLGAIIIAAVIGLIDFPAVYHIWKMDKMDFLVCVCAFAGVIFISVQEGLAIAVGISIFRVLMQITRPKMMVQGNIKGTDIYRDLHHYKEAQRVSGFLILAIEAPINFANSNYLNERIKRWIEEESFEQDKHTELHFIILDLSAVPAIDTSGIAFLIDIKKSIEKRGLELVLVNPTGEXHGENTTCKRGXKTILGQIACIXTTGEAIASLSALAKMTKP

SEQ ID NO: 366871 - protein, 57 aa, Zea mays
  Clone ID: MRT4577_97751C.1.pep
GYEFYFFTWGKNLNCPGKIRGAFFSTPLVILPIPGEQHKFFGISKLSFTPNYICHLL

SEQ ID NO: 366872 - protein, 60 aa, Zea mays
  Clone ID: MRT4577_97752C.1.pep
SSELDPCSRLHNNSCFLLWSNKKCFCLIKVASLWLCGNNVPWSRATATIPFLKEKTRSPH

SEQ ID NO: 366873 - protein, 76 aa, Zea mays
  Clone ID: MRT4577_97753C.1.pep
PTQGFPPPSQLFSLGPPFTPETLLGAFLKMGAKNKLRGPAPIKPTGHPQIIFWAPFFWGIPKSPKNKKVFLWVQKC

SEQ ID NO: 366874 - protein, 62 aa, Zea mays
  unsure (1)..(62): unsure at all Xaa locations
  Clone ID: MRT4577_97754C.1.pep
ERGEVLKLQWPMPLRKAKVNTLVFEHSYGHGQNMSLNLCALEGFAALTVNSPKIQFVFEKKX

SEQ ID NO: 366875 - protein, 118 aa, Zea mays
  Clone ID: MRT4577_97755C.1.pep
RGMNFFKPKSGEKGGGFTLGDLPSFWRGGCIFRPFFWDPIKKALAGNRAFPTFLLDPDFAQEIMTSQAGWPRVVSFPIKKGVTPRGMSVSWAFLDSSRGDRFLPNLGQAQGDFLGAPP

SEQ ID NO: 366876 - protein, 319 aa, Zea mays
  Clone ID: MRT4577_97756C.1.pep
MGLVESTKITLDNKEDLVVDLSTELVEKDLQVEQMANHIQELEDQVEARENTIEVLEDQLQNTHQQLEEANQHLDLHHQEIEDMEAEGAHEDIDIERGEEPEPASSLYTTGSGGPPSPESIVASFAPHSASATTSALWGGDHHQRALVAATYLEFLSTQPPLFTKAEDPLDADIWLKVVESMFPLLHGECSDAAKPTDHVVEWEEFKMAFRGHHIPAGIMDRKLNEFLALIQGSRTVLQYAQAFNDLCQYAGYHDDTNEKKRHRFRRGLNTKLHDPLNTVKAHSYNELVNLAISQEDCISARQAEKKRKIHMAGPSAQP

SEQ ID NO: 366877 - protein, 214 aa, Zea mays
  Clone ID: MRT4577_97757C.1.pep
MSGGAPDELPPVAKTSATPEPYASLNVAGGGQPNEPAAGRPPKLSMETFSGMIKRPFAKFLSPVIKGVCAKTEYPEDCESSIGGLPGAASAAATDSVGVLKLAMEAVRQKAIEAMNAATDRMNAPGTDPTTKEALDSCTSSYSDIKTSLETVDDALKRGDVDTAHTNLDSVETDITTCDDGFQERGTPSVMTDHDQELQKLASNLLSIGAAIHH

SEQ ID NO: 366878 - protein, 215 aa, Zea mays
  unsure (1)..(215): unsure at all Xaa locations
  Clone ID: MRT4577_97758C.1.pep
HEVSTLRGNESGKDVGDVKYVPDNKAETVHKLFKFIEDGDLWRWKIPNSKAFSSGLKDLDIEFNVNTNNKLFDQLLELDPERVISHGQATLLEKQRLIDDCLEKSYEISLGCGQVGXCLAVXADAISNLRSELGNQLASKSRDFNLRGIGAVVYKVPELNNDQILKVSLRSLEQEDTTCISQEYGGGGHRNASSFILSVTEFDRWKVGSSRPKGA

SEQ ID NO: 366879 - protein, 349 aa, Zea mays
  Clone ID: MRT4577_97759C.1.pep
MACAGAARKVSAVLYHYPCPDGAFAALAAHLYFSGAAHPVRFFPNTVYDPIRSDSLPLEEIKDVYLLDFVGPPGFVEDIAPKVERITILDHHKTAFESLCVNATLGQNVTKVIDMQRSGATIAFDFFRNKLLTEVSTSRGNESGKDVAKVKYVPDNKAETVHKLFKFIEDGDLWRWKIPNSKAFSSGLKDLDIEFNVNANNKLFDQLLELDPEHVISHGQATLLEKQRLIDDCLEKSYEISLGCGQFGSCLAVDADAISNLRSELGNQLASKSRDFNLRGIGAVVYKVPELNNDQILKVSLRSLEQEDTTCISQEYGGGGHRNASSFILSVTEFDRWKVGSSRPKVLKT

SEQ ID NO: 366880 - protein, 161 aa, Zea mays
  Clone ID: MRT4577_9775C.1.pep
ISKMKRMHESALQEKTEELFRLKREKGSHSLKNDIEFEPLRKKIPELVLRMDQIISKNIKVPAICMTHDELDERCRLMSRIDALFYENQHFRGLLADRMKDVKALSSQLSEASTELSMQMLSEEELLRQIDKVREDCEDLRIECDVREGMYQTVTKHLLDD

SEQ ID NO: 366881 - protein, 88 aa, Zea mays
  Clone ID: MRT4577_97761C.1.pep
PAMLQPNRPVFGARGSLALGRPSAPLLHTRNSVNVPREQLVVVAARVPDELLTQVQHHGPEQVLHTDPVGEQLAARHCHSAAGTLRAC

SEQ ID NO: 366882 - protein, 200 aa, Zea mays
  Clone ID: MRT4577_97762C.1.pep
PFVSFSFRATSAWTLAPRPRRHGFLPGRPPLSRRQPPPTPSTSEDRRPRARLSSPPPAASPPLPPGPRVAAKLATGAAGGTATGRARRSVGVDVAALAAALRDARTADDVESSVNAFLSDDEARLLPLQVYTCVIRGLGKGNSPDAAFAVVEHLKRRGVVPNQFVYNCLLGAVKSCGELGRVQAVLDDMEAQGVPTNIGT

SEQ ID NO: 366883 - protein, 65 aa, Zea mays
  Clone ID: MRT4577_97763C.1.pep
GAHLHCRWLRNCMPWREQTSQVLLTRIEMCILLTQLTIDRRYVSHDYEQHLATAVMQLLHISSHK

SEQ ID NO: 366884 - protein, 115 aa, Zea mays
  Clone ID: MRT4577_97764C.1.pep
REILVRCDLTKLHLDARNPFPWKTFYFLSLKNWGKSCFNRYSMLPQKLRIQASEPNPQSKLTSPQEKKPGDNLNYLLVQIPGAKSHNSSLRALYFKKIQLLPFGRFISANFLTES

SEQ ID NO: 366885 - protein, 160 aa, Zea mays
  Clone ID: MRT4577_97765C.1.pep
KFLPGFFAQGIPPQNPFKVLDQKGVGQLVKFSPKRGPKNRPNFKGGLFGKPGGKPSPLAFFPKGGGGYVSCPPFRGPIFRPTPTPGVVLGCPPLGNPNAPRWGRGGPPGFFQNPALWTFLGTGVKKSPIPWPFFSPAWKTSQLAPGLKTCFSKPPPFSVF

SEQ ID NO: 366886 - protein, 45 aa, Zea mays
  Clone ID: MRT4577_97766C.1.pep
PSHSPRYWFQRSRLRRSVHYNLLVDLSAIVHKKNDAYQPEPNSEL

SEQ ID NO: 366887 - protein, 70 aa, Zea mays
  Clone ID: MRT4577_97767C.1.pep
MRRWCPAALLGCVVALSVLVAAVECAVAYDKKAVLIDGQMRILFSGSIHFPRSTPDVTAFYKISFSPHYS

SEQ ID NO: 366888 - protein, 100 aa, Zea mays
  Clone ID: MRT4577_97768C.1.pep
GFSGEELDDVHCYDPATREWAAVQTTGDRPSPRSVFCAAGFGRHVVLFGGEVDPSDLGHLGAGKFSAEAFALDTETGAWTRLDDRAEAEHHPGHRGWCAF

SEQ ID NO: 366889 - protein, 124 aa, Zea mays
  Clone ID: MRT4577_97769C.1.pep
REKKSSITYPFMSNLHGLQLKILVNIASILKNVFAATITIACNILQNTAVTQKQRGTANGISVTMMSMFKAAAPAAAGIIFSWAQKHIYGLFLPGNQILFLTLNMVSIIGLVLTFKPFLSQPIQ

SEQ ID NO: 366890 - protein, 184 aa, Zea mays
  unsure (1)..(184): unsure at all Xaa locations
  Clone ID: MRT4577_9776C.1.pep
DSWAARRRGPASXGGPPPAPXGRRASARSSRRRHRRXERRGPAGSMLPPXAGDRSSRPPPWRRGERRAPFQAPRRPRPPLLRRRRPPCTGCKPRXRQSKXTPRASEGAGPPRAPAPAPAAARAGGTARAGPCRRRWWQSRRPPSPRRRRGGRPSSCLRLRRRPCRRQLLATARTPPPPPPAAAT

SEQ ID NO: 366891 - protein, 127 aa, Zea mays
  unsure (1)..(127): unsure at all Xaa locations
  Clone ID: MRT4577_97770C.1.pep
RLPHQIRARPFTAFTGGTGNQRPWPRFRRRPSAACLSVLLCAAAXPASTGYLLDYIIQGRVYCDTCRAGVVTNVXTEYIAGXAKVRLKGKHLGSGKLERSIDGVTDANRTYTIELKDSHEEDICQVV

SEQ ID NO: 366892 - protein, 142 aa, Zea mays
  Clone ID: MRT4577_97771C.1.pep
KKGKTGSHEFYQQQRGGRGSGETSQTKKRPGIKGLAPMGKKNMGGTNIRAPKGNPVQKFEHPKNFFPKIKRNPPRSGPPFGGKKKRVFWAQGFNFKKAWSGVQRPRPKTTRFWGTGFCPPTSFPAKKPRGKNVGPGTAWPNF

SEQ ID NO: 366893 - protein, 64 aa, Zea mays
  Clone ID: MRT4577_97772C.1.pep
VRLVGARAGSPVVGGTQAGVELDRLAARVPHPQVSARIMLSRIGKWSSKNLAERRPRVRPGVPV

SEQ ID NO: 366894 - protein, 80 aa, Zea mays
  Clone ID: MRT4577_97773C.1.pep
RSHPRTLFRTKDNIGYMERNEPINTSRWSMFQTKRARWLCITQFLAAKRNVCLASACTICFNPGQPKQSPFPSLSLALHR

SEQ ID NO: 366895 - protein, 46 aa, Zea mays
  Clone ID: MRT4577_97774C.1.pep
VNILTSISNNGIFSYSSIKCLGVSGFFYCLLICWPSWLNQKSPQHT

SEQ ID NO: 366896 - protein, 227 aa, Zea mays
  Clone ID: MRT4577_97775C.1.pep
TTKMDDLDSLLSDLGKRRDDNSSTRKTRPPTSRVDLNELASLMEVLAAPTPQQAETKQAAPSRSARETTTVDDLDALMESLSAASGNNNRGTQRIGTTSAKQMGNVSAYAEPVVESASTYNSLRSPDLSNPAYQSRPVSTVYNSPGLESRSGGYVPAASASHNDNSYQSSPYSPNNGSAYNSRPVTSVYSGGVDHTPPAYNAPPNYAGHRESQNLGGPAPGVRKPDE

SEQ ID NO: 366897 - protein, 322 aa, Zea mays
  unsure (1)..(322): unsure at all Xaa locations
  Clone ID: MRT4577_97776C.1.pep
MAGRSRYDNPFEEGGADEVNPFADQAKRGGSTAQSGYSGGAFYTTQSQRPAPPSTRLSPLPPEPADFYNDFATPVDIPMDTNKDMKTREKELLAKEAELNRREKEIKRREDAAARAGIVLEEKNWPPFFPIIHNDIGNEIPVHLQRTLYVAFASLLXGRDACFDQFSGRQRDCRDLLLHWXALFCLESSLSMCVIQRXPLLPRKWEGSGDXGKQHAVLERGSILTNRVCIYSTACVLFIVCSAVSPSILFVXKSLTGILPAISLIGDSVIVGIFYFIGFALFCLEALLSVWVIQRVYLYFRGSGKEAEMRREAARGAARAAF

SEQ ID NO: 366898 - protein, 99 aa, Zea mays
  Clone ID: MRT4577_97777C.1.pep
GSHGRCRDGFLRVWPWLLHRRAHGLRIYFPLPVLFACVCMHPLVMHSILVRPPRRPKKSIVSCFGAFLHFHCMPSVRFLSVESSSNNKGPLLPPQVILT

SEQ ID NO: 366899 - protein, 123 aa, Zea mays
  Clone ID: MRT4577_97778C.1.pep
MAGRSRYDNPFEEGGADEVNPFADQAKRGGSTAQSGYSGGAFYTTQSQRPAPPSTRLSPLPPEPADFYNDFATPVDIPMDTNKDMKTREKELLAKEAELNRREKEIKRREDAAARGGVSEFIV

SEQ ID NO: 366900 - protein, 147 aa, Zea mays
  Clone ID: MRT4577_97779C.1.pep
NREHLFLSPLWVRLPRYAIARFKRMVSNLTTSKSSAWYPNSSVSRTIFPCSGNAHPWMSTRNCSDLRHVKKTLDKQHAALLIKKKNQSLRDSMLTCLADENMDACKAQPRSAAQRCRIGDQSSNTARTGSSRLAAVSMKSAAASRYQ

SEQ ID NO: 366901 - protein, 125 aa, Zea mays
  unsure (1)..(125): unsure at all Xaa locations
  Clone ID: MRT4577_9777C.1.pep
TTSPESATRSCSTLPPLRPPSRAPPSPRPAPYPSTTYPTTRTTLMQQKLPPTSTTGSTPTSLAPEPPPTSTTDSXRRPXPEAVSLVPPPRAARPPSPPRPKAPRAPRDQRARTMSGRPPGARRWV

SEQ ID NO: 366902 - protein, 313 aa, Zea mays
  Clone ID: MRT4577_97780C.1.pep
MAGRSRYDNPFEEGGADEVNPFADQAKRGGSTAQSGYSGGAFYTTQSQRPAPPSTRLSPLPPEPADFYNDFATPVDIPMDTNKDMKTREKELLAKEAELNRREKEIKRREDAAARAGIVLEEKNWPPFFPIIHNDIGNEIPVHLQRTLYVAFASLLGLVLCLFWNIICVTAAWAKGSGPKIWFLAIIYFILGCPGAYYLWYRPLYRAMRNESALKFGWFFLFYLIHIAFCAYAAASPSILFVGKSLTGILPAINLIGDSVIVGIFYFIGFALFCLEALLSVWVIQRVYLYFRGSGKEAEMRREAARGAARAAF

SEQ ID NO: 366903 - protein, 86 aa, Zea mays
  Clone ID: MRT4577_97781C.1.pep
LGGRPGSTNPSPLLHISAAAHPSPAAPHPLSENKRCPPGRWPSYRDPSRHHALSRSRMQYYRPRSIANHQRYPSTPSHVYFTDSKR

SEQ ID NO: 366904 - protein, 394 aa, Zea mays
  Clone ID: MRT4577_97782C.1.pep
MATSSTALLHLVIPASRRRRHLVPRAAHSESAPPAASVDRRRFIAHTAAAAAVSPLVLPRWTPAARADEVPALSEWERIFLPIDSGVVLLDIAFVPDDPSHGFLLGTRQTILETKDGGNTWFPRSIPSAEDEDFNYRFNSVSFKGREGWIIGKPAILLHTSDAGESWERIPLSAQLPGNMVYIKATGEQSAEMVTDEGAIYVTSNRGYNWKAAVQETVSATLNRTVSSGISGASYYTGTFNTVNRSADGRYVAVSSRGNFYLTWEPGQPFWQPHNRAVARRIQNMGWRADGGLWLLVRGGGLFLSRGTGITEDFEEVQVQSRGFGILDVGYRSQEEAWAAGGSGVLLKTTNGGKSWMRDKAADNIAANLYSVKFLDDRKGFVLGNDGVLLRYLG

SEQ ID NO: 366905 - protein, 51 aa, Zea mays
  Clone ID: MRT4577_97783C.1.pep
LSLYTKKAKYFSNLVKFIYYLIPYTYYIIHGDVSTMLCHNIHITQIISFFT

SEQ ID NO: 366906 - protein, 132 aa, Zea mays
  Clone ID: MRT4577_97784C.1.pep
RKGGNPNAPGVKATQKGGVQLAIKATPLLVKPQGRALFLFTPAGKKGWKAKRVKLVKPKVFQVKGVLTPGNLIWLRHGLKKTIQLKAQASKFEFRKPQTQFFFFYPPPILNSLLLNFFFFFFFFFFFFFFFF

SEQ ID NO: 366907 - protein, 255 aa, Zea mays
  unsure (1)..(255): unsure at all Xaa locations
  Clone ID: MRT4577_97785C.1.pep
IPGLVYIKXTGEQSAEXVTDEGAIYVTSNRGYNWKAAVQETVSATLNXQYLVPVCXRTVSSGISGASYYTGTFNTVNRSADGRYVAVSSRGNFYLTWEPGQPFWQPHNRAVARRIQNMGWRADGGLWLLVRGGGLFLSRGTGITEDFEEVQVQSRGFGILDVGYRSQEEAWAAGGSGVLLKTTNGGKSWMRDKAADNIAANLYSVKXHTLLLLLRSLACHKHFVRNCDAGCCHRFLDDRKGFVLGNDGVLLRYLG

SEQ ID NO: 366908 - protein, 41 aa, Zea mays
  Clone ID: MRT4577_97788C.1.pep
IDGRTHASAHKLLLWILRLLMRRSNWRTAKYATGQGISYLS

SEQ ID NO: 366909 - protein, 85 aa, Zea mays
  Clone ID: MRT4577_97789C.1.pep
NSSIFFSFFFWSTQFTPFPFFAPFVNALSGFPPPPPRGVGLINKKKKKKKKIKKKKKKKKKKKKKKKKKKKKKKKKKKKKKKKKK

SEQ ID NO: 366910 - protein, 133 aa, Zea mays
  Clone ID: MRT4577_9778C.1.pep
ERKDLERELLAKLLVYLCTAQEHLLSQRQLLQGFQHVLSTLEDAVTDAPKATKFLGQIFARVVLEDGISLTEVGGLLQEWDGREEPAGQHALEDSLASEVLGSMLESIRVERGDNAVDEIRAKSNLQRRGVCA

SEQ ID NO: 366911 - protein, 94 aa, Zea mays
  Clone ID: MRT4577_97790C.1.pep
CIKAFVEQYKEAYRAGKPPTLHRITGRERSYYVQIRELHLICVHYSDSDFRTGTNWIHSTPCMDAETNHLLSVVEYLGSVPVCLVSKTLPRHTG

SEQ ID NO: 366912 - protein, 66 aa, Zea mays
  Clone ID: MRT4577_97791C.1.pep
KPARDIILSREAFSTDISTRVLTVNGGLAPESSLMPVIGRNFLFLNFLRGVLLHIKAALPEEAYRA

SEQ ID NO: 366913 - protein, 60 aa, Zea mays
  Clone ID: MRT4577_97792C.1.pep
LLVAKTENFRSQAQDFRHQGTNVRRKMWFQNIKIKLIVLGIIIAPLLVIIPSVCQGFKCP

SEQ ID NO: 366914 - protein, 66 aa, Zea mays
  Clone ID: MRT4577_97793C.1.pep
LQVYKLVHIRKSHTLRRHQRSSQQQCEIPVSLYVIQSHDCNRQSVKHRLAHMVDAEFRISKLEDFC

SEQ ID NO: 366915 - protein, 50 aa, Zea mays
  Clone ID: MRT4577_97794C.1.pep
YRSNIAAHFTYYKSTRSTIHDPTNEFVSAANRIPCHLKHRIFTWARFLMK

SEQ ID NO: 366916 - protein, 128 aa, Zea mays
  Clone ID: MRT4577_97795C.1.pep
KRGCRSTHCRRSLKHAEICFLYCSARRRWTVPRESAVRVALSNGHAPSCAPKMINCAPRSRVCLQFPVAFRQRAHGSCFLDQLDASNKIHAKTLRMEPLLYLKYLQVSAHQSNIHQCFSPFSKHANEM

SEQ ID NO: 366917 - protein, 79 aa, Zea mays
  Clone ID: MRT4577_97796C.1.pep
FPGRPTTSTHASAHASADAWAHGVNKAERRLIPTSDPQRKAEPGPGAGPVVFPPRLRQLVFNSLFTHILVFNSLITSVR

SEQ ID NO: 366918 - protein, 56 aa, Zea mays
  Clone ID: MRT4577_97797C.1.pep
RQEIKIPNCLSNTPWVFYSSNHSLIVYRHKRPLLTFRTKGTNGMPIHENRGYSTAT

SEQ ID NO: 366919 - protein, 83 aa, Zea mays
  Clone ID: MRT4577_97798C.1.pep
IYWVVFSHLLMQVGDMVHWQLVGPLMPPSVVVVDDSFQSSVCLYCPVPVDATVLLGAVICFPHALSCSMWARTPACVSYHISN

SEQ ID NO: 366920 - protein, 143 aa, Zea mays
  Clone ID: MRT4577_97799C.1.pep
CIATGAIQTRRGCAGLVCYSTVTKALREGGNTSGARVLDGVHGEDEAGSSPQGQQRAQLEDGELPTVVRGFGRARTRGSTAARRSCSAASKDPSTGARTREKQRRSASTARSERPEFLSRPNTERSTNPRHDGGHSQAEGRGC

SEQ ID NO: 366921 - protein, 78 aa, Zea mays
  Clone ID: MRT4577_9779C.1.pep
GKLLVIHEAPLSGGFGALIAAFIADRCFHRLLPPVVTVFGFATPFPLVDEAFYMATIFKVFFSLKAFVNLFNFLFFFY

SEQ ID NO: 366922 - protein, 56 aa, Zea mays
  unsure (1)..(56): unsure at all Xaa locations
  Clone ID: MRT4577_977C.1.pep
RSEFGFENQARGXXXKTPRRGGGTTLIMLRPPTSMASYFCLGDRSFLSLLLGSVLS

SEQ ID NO: 366923 - protein, 230 aa, Zea mays
  Clone ID: MRT4577_97800C.1.pep
MSGQQDHASKSSSSSISSSTQESEEEAPVRSVTIGSLLAQANSTSGHSLGKRLSHLGSIPYTPRVNGKIPNVGNATLDHERLLERLGTYGLAEFQIEGDGNCQFRALADQIYHNPDYHKHVRKAVMKQLKEFRKQYESYVPMEYKVYLKKMKRSGEWGDHLTLQAAADRFGAKICLLTSFKDTCLIEIVPRDLTPTKELWLSFWCEVHYNSLYGIDDLLTRKTKKKHWLF

SEQ ID NO: 366924 - protein, 84 aa, Zea mays
  unsure (1)..(84): unsure at all Xaa locations
  Clone ID: MRT4577_97801C.1.pep
MMLCHSSTPLSLSHRRRTRDPSGSVRWTPPVAGCSVPRDRRTISSAAAPLRLRMWCCGGGRRWPPGRXRPWWPHGRSFTACPAR

SEQ ID NO: 366925 - protein, 52 aa, Zea mays
  Clone ID: MRT4577_97802C.1.pep
LCQMQTLRGSLLPSLLSFCYHSSALSPALTTHKTAAANQTYAATSLATEARP

SEQ ID NO: 366926 - protein, 134 aa, Zea mays
  unsure (1)..(134): unsure at all Xaa locations
  Clone ID: MRT4577_97803C.1.pep
LPLRTAHTQSSTNSSSFASTSTRAKRPARLPQRKTLASPAPNPWRLRSLIPVQWRRRRTCSLTLPSPTSLPPPPRPRPPPRSGSAPPPGPRASASSSPGRTRRSPRSTSDLADXXRYLSWXPMXXXLCRVRNES

SEQ ID NO: 366927 - protein, 133 aa, Zea mays
  unsure (1)..(133): unsure at all Xaa locations
  Clone ID: MRT4577_97804C.1.pep
MQWRAAAGGRAWSRTWAACRTWCASSSCSCARPGTQPPSTXPPPRPPXSSRSPTAPSACSTHPRTSPRRCPPLGPGARSAATPPPTTPSAPPPAPAPAPRSARPRGAGPPSKCASAPRAAAAPRAPSTTATAG

SEQ ID NO: 366928 - protein, 109 aa, Zea mays
  Clone ID: MRT4577_97805C.1.pep
APRGQGLFPPPHFGGGGFLCPPPGVPPGVYGPFMARGCLPSGECLTLPLRKCPDIPTPFPLKILEGGSDLGPPFMADKLGLKNGGGSGGPRGPEGGLAVFGGRLFVWPQ

SEQ ID NO: 366929 - protein, 72 aa, Zea mays
  Clone ID: MRT4577_97806C.1.pep
INNLCHTFFPTSVLAVIIDLKSLAAVILGGGMGPQHMLIVCVESTLRPSRTIFLTNITFNQVTKKKKRAAPD

SEQ ID NO: 366930 - protein, 112 aa, Zea mays
  Clone ID: MRT4577_97807C.1.pep
VCCHRAQVFRVSMGPLHPLYLSCGQIFPAGLWLRARVHLWCPVPVESVFLVSHGLRHSISSRRISSITSVRYVRSDSPGPSGGVPAAAWRLVSVYSSRRESEGHADGRSMRC

SEQ ID NO: 366931 - protein, 112 aa, Zea mays
  unsure (1)..(112): unsure at all Xaa locations
  Clone ID: MRT4577_97808C.1.pep
ITPSSNSLFHHTDVGILFYYEAMLDMCGRFLDIELLMYTNLNRLVSKVMXSLTDYMKCDGAPNVDDNEDHTNLVPYSRIHVMLSTYAPVISDEKAYYEQINDVDITNSAFEL

SEQ ID NO: 366932 - protein, 124 aa, Zea mays
  Clone ID: MRT4577_97809C.1.pep
DCKNTTICQQTTRTIGNTLDIIPNQALSQAQRGTTYWKNAQRTYTTYYNISPDRKREKPHTTQRSTSIITTIKQMRSSQKEHHQVDQTSETRTHESTGNTSSHWSPSISATHRLTCRPSDELPS

SEQ ID NO: 366933 - protein, 100 aa, Zea mays
  Clone ID: MRT4577_9780C.1.pep
KAGGSETKKELVGSQKKIAELLTEVQDTRANVAELEDLIRRLEGKLAITEALLLTEKEQNASTLKLLAEAQLRIEELIKKLEGSNRKSDSLQDTITRLEQ

SEQ ID NO: 366934 - protein, 45 aa, Zea mays
  Clone ID: MRT4577_97810C.1.pep
LIRGLQFPSYFPKKKKKKKKKKKKKKKKKKKKKKKKKKKKKKKNT

SEQ ID NO: 366935 - protein, 50 aa, Zea mays
  Clone ID: MRT4577_97811C.1.pep
IGYLEAGQTYKNSVKVILDVKKEKTDKVLNLRLILSLTIYLYLCHLHLVC

SEQ ID NO: 366936 - protein, 123 aa, Zea mays
  Clone ID: MRT4577_97812C.1.pep
TRIRHNSSKRHVSNLHIQERNNTHISNRTKINRTIPKAIHQIILRNINNKLPKKTKKEHRTHRRTRSRTRKRIRRYLLPRIATNPPLLNPIQHHRHRHTHTRNHTRTTTKSQRNLKSKLSRNK

SEQ ID NO: 366937 - protein, 59 aa, Zea mays
  unsure (1)..(59): unsure at all Xaa locations
  Clone ID: MRT4577_97813C.1.pep
HRDDALHKRREIIVPNAGRPHPRTAVTNWAPDNDMRSNXQYGHADDTFARRHVGDHAAP

SEQ ID NO: 366938 - protein, 241 aa, Zea mays
  Clone ID: MRT4577_97814C.1.pep
MASSYYDDTAAMYDAITLTQQLKYYKEYQSKLAAVAGRARARAILGDALYVVSTGTGDFLQNYYHNASLSRRYDVEQYTDLLVGIFSGFANELYRLGARRIGVTSMPPLGCLPASIRLYGDGKGACVPRLNRDAETFNAKLNATVRALKRRHADLKLAILDIYTPLRKLAQDPAAYGFADARGTCCRTGTAKTRVYLCNPTTAGTCRNASSYVVFDAVHPSEAANVFIAESTVDAGIELVT

SEQ ID NO: 366939 - protein, 77 aa, Zea mays
  unsure (1)..(77): unsure at all Xaa locations
  Clone ID: MRT4577_97815C.1.pep
ITEDFHYMGADLWFPNLESLLRDSASGFLFAVYSGPAPGADDLTNFHXVLSRVLSTYSDPPVEVVWFLFALCLHDRP

SEQ ID NO: 366940 - protein, 81 aa, Zea mays
  Clone ID: MRT4577_97816C.1.pep
YCDQPAMDCLSSLNPRHVDSAPTQNGGQGTSPDASLPSSRLHPYPSAHIIHRPEEPRQVTTAPRRWCSNSAVRGRAQPGKW

SEQ ID NO: 366941 - protein, 357 aa, Zea mays
  Clone ID: MRT4577_97817C.1.pep
MASSQLVVVCLFVASAVTVTMNGGAQAQPIVPAIISFGDSTVDVGNNNYLPGAVFKADYAPYGQGFARHKATGRFSDGKIVTDITAETLGFESYAPPYLSPQASGKNLLTGANFASAASSYYDDTAAMYDAITLTQQLKYYKEYQSKLAAVAGRARARAILGDALYVVSTGTGDFLQNYYHNASLSRRYDVDQYTDLLVGIFSGFANELYRLGARRIGVTSMPPLGCLPASIRLYGDGKGACVPRLNRDAETFNAKLNATVRALKRRHADLKLAILDIYTPLRKLAQDPAAYGFADARGTCCRTGTAKTRVYLCNPTTAGTCRNASSYVFFDAVHPSEAANVFIAESTVDAGIELVT

SEQ ID NO: 366942 - protein, 390 aa, Zea mays
  unsure (1)..(390): unsure at all Xaa locations
  Clone ID: MRT4577_97818C.1.pep
MASSQLVVVCLFVASAVTVTMNGGAQAQPIVPAIISFGDSTVDVGNNNYLPGAVFKADYAPYGQGFARHKATGRFSDGKIVTDITXLAIPPRMHYAWRRLQVCDELIERVRSVHCLLXAETLGFESYAPPYLSPQASGKNLLTGANFASAASSYYDDTAAMYDAITLTQQLKYYKEYQSKLAAVAGRARARAILGDALYVVSTGTGDFLQNYYHNASLSRRYDVEQYTDLLVGIFSGFANELYRLGARRIGVTSMPPLGCLPASIRLYGDGKGACVPRLNRDAETFNAKLNATVRALKRRHADLKLAILDIYTPLRKLAQDPAAYGFADARGTCCRTGTAKTRVYLCNPTTAGTCRNASSYVFFDAVHPSEAANVFIAESTVDAGIELVT

SEQ ID NO: 366943 - protein, 433 aa, Zea mays
  Clone ID: MRT4577_97819C.1.pep
MARPQRVYEAWKGNNKFFFGGRLIFGPDAKSLILSVSLIVAPVLVFCGFVARHLRHHFPAYNAGYAIPAVAVVFMIYVLVLLLITSAQDPGIVPRAAHPPEDEFSYGNALSGGTPGRLQFPRVKEVLVNGMPVKVKYCDTCMIYRPPRCSHCSICNNCVERFDHHCPWVGQCIGQRNYRYFFMFVSSSTLLCIYVFAMSALYIKFIMDEDYPTVWKAFKHSPASLGLLIYCFIALWFVGGLTGFHMYLISTNQTTYENFRYRSDSRPNIYSQGCLNNFLQVFCSKTKPSKHKFRAYAQEEVRPPTVSFGREVDEEPVGGPRPKVEDDLEIGTDLLKISQRRNYEDVDAETGGRRSRSSEVEGTASARPAVACSESQIPAVGGTDVRVRHSSWDRRSGNWDMSSAVLTRSASDVIGRSSVFAADAARPSLEETR

SEQ ID NO: 366944 - protein, 115 aa, Zea mays
  Clone ID: MRT4577_9781C.1.pep
PLLPLLPDPLQLPEPLLQQGDGGEHHLALAALYPHDEQKLLVFKKKKKKRKKKKKKKKKKKKKKKKKKKKKKKKKKKNPGGGPRPPIPPIGGGITPPPGPGFNTAGRGKTRGYPN

SEQ ID NO: 366945 - protein, 95 aa, Zea mays
  unsure (1)..(95): unsure at all Xaa locations
  Clone ID: MRT4577_97820C.1.pep
RPTRITLTYSNEGALTEGPWLDLDGYYWKRWPAHGLINDTQFDKMSKRCYDTGHLSDTAKHVXRLNGHEARKVMMKHDNRIPHTHTGELHLTYIG

SEQ ID NO: 366946 - protein, 110 aa, Zea mays
  Clone ID: MRT4577_97821C.1.pep
HRCRTRRITRCRRRLPHSGSSAAEDERGITVRRACTSAHSSPSTAYTGETPPPKRREVLRHGTRRRRPPNTPTGRSALLLPHSSPGASLGQYCLRELLWLHVVGCLSNIL

SEQ ID NO: 366947 - protein, 69 aa, Zea mays
  Clone ID: MRT4577_97822C.1.pep
FSICRWIPSFHGIKCVVAIQTFWDAQPCLEARETALFLILFPIFDAGILIALLRLHCSVRVGYLSVPVG

SEQ ID NO: 366948 - protein, 34 aa, Zea mays
  Clone ID: MRT4577_97823C.1.pep
NSTMSHTISIIINLITQLNYFIITNYTITSKYLI

SEQ ID NO: 366949 - protein, 277 aa, Zea mays
  unsure (1)..(277): unsure at all Xaa locations
  Clone ID: MRT4577_97824C.1.pep
MITIPNLDIHVGQSYSFLVTMDQNASSDYYIVASARFVNESLWTRVTGVAILHYSNSKGKASGPLPDPPNDEYDKSFSMNQARSIRMNVTTGAARPNPQGSFHYGEINVTQVYKLRNMPPVTINGKRRTTLNGISYSPPATPLRLADLYDKKEVYTLDFPTMPSDGPPAIGSSVINSTYKNFMEIVFQNNDTKVQTYHIDGYAFWVVGMDYGEWKNESRSTYNKWDGVSRCTTQVFPGAWTAVLLSLDSPXFWNVRTENLDTWYLGQETYIRXVVDP

SEQ ID NO: 366950 - protein, 152 aa, Zea mays
  Clone ID: MRT4577_97825C.1.pep
YPRVRGRVGGRVGRHRPPATLVPHIAGEAFQLTEWYTVPKGAIVFPSVYESSFQGFPDAEAFDPERFFSEARREDVAYRRNFLAFGAGPHQCVGQRYALNHLVLFMALFVSVVDFRRERTPGCDDPVYMPTIVPKDGCSVYLKQRCAKLPSF

SEQ ID NO: 366951 - protein, 209 aa, Zea mays
  Clone ID: MRT4577_97826C.1.pep
MAGSSSSISGFASMISHPVSEKLTKNNHATWKAQVVATIRGARLEGYLTGKTKMPAAELVSKDGDKVANSAYEDWLASDQQVLSFLLASVSKDVLIQIATKHTATEAWHAIETMFSSQTRARAVNTRLALSTAHKGNMSVAEYVGKMRSLGDEMAAAGRPLEDEELVEYILTGLDDDYDSLVSAVLARAEPISVSELYSQMLAFETRMD

SEQ ID NO: 366952 - protein, 56 aa, Zea mays
  Clone ID: MRT4577_97827C.1.pep
ENNRMLTLVGGYQPTISGVLRNGFFWDRQKNPGDVTLNPPPWTGPGYLGYFWKNNP

SEQ ID NO: 366953 - protein, 239 aa, Zea mays
  unsure (1)..(239): unsure at all Xaa locations
  Clone ID: MRT4577_97828C.1.pep
GTSRPAGVHQVTPANGQKWVSVEATRNVFNFTLGDQIVNPSKKAGQLRRCHNFVWHQQLPDWLTSQKWSKQELLSILENHIKHEAQHYYNDCYAWDVVNEAFNDNGTYRSDIWLDTLGPSYIESAFKFAKKYTAPGTKLYYNDYNIETVNNKSLAVQTLVKSLQAQXXQIDGVGLQSHFITGSSPSYDQIRAAQQLFTSLGLETALTELDVRXRSCPTPRRCKATQATNYADXRQGVCR

SEQ ID NO: 366954 - protein, 86 aa, Zea mays
  Clone ID: MRT4577_97829C.1.pep
RKRTGEKRESVKLVAPAVGSLTCSPRRCRSIHRSWRTARSYAGAVATAALAGVRGAWCVCRSDLRTRAAEDAGLPFRRQTDCKPIL

SEQ ID NO: 366955 - protein, 92 aa, Zea mays
  Clone ID: MRT4577_9782C.1.pep
LFITFFNLWPHITFFFAQEKKKKGDESFFLKRNLTAPKVAEKEGTRPLKSLKNWGTPRLNPQGPPENSVRGPCGGPLFPHRKLIKRRGNPPR

SEQ ID NO: 366956 - protein, 37 aa, Zea mays
  Clone ID: MRT4577_97830C.1.pep
FVASPSPGFVGDWPCLPATLLPPSVGTVQPLGGLEPN

SEQ ID NO: 366957 - protein, 330 aa, Zea mays
  Clone ID: MRT4577_97831C.1.pep
HASAALAYMEDEGQWVLAFWIATAAALLGFLLFAVGTIRYRHFLPSGNAVVSVCQVVVAAVRNRRVRATVRAQDMYDPDTDGDRGKKGVRKMVHTPEYRCLDKAAVIKDPASAFRAPAGQPQGHSSSKPNPWRLCTLTQVEELKCILRLVPIWLCSILYSTSYSQMSSVFIEQAQTMDDSLSKLTIPHAGMDVFEILGVTAFVFIYRFCIVRVMAKISHEPTELQRMGTGLVISAAAMVASGVVEQQRLARATAGVDASSSLSILWQIPQYLLIGASEVFMYVTMTEFFNDQLPEGLRSLGSAMSVASMSAGSFASSLLVTLVMAITCRG

SEQ ID NO: 366958 - protein, 67 aa, Zea mays
  Clone ID: MRT4577_97832C.1.pep
TTVTECQRSPTTLILPPAVNIMTSKKLQHMYENMQRAVNNADDHISYSPHDFANFFSQNTAMPREIR

SEQ ID NO: 366959 - protein, 40 aa, Zea mays
  Clone ID: MRT4577_97833C.1.pep
MDNKGRHPIPCLRYIIDKDDMKNCTALLYKVSDTFLASSI

SEQ ID NO: 366960 - protein, 120 aa, Zea mays
  Clone ID: MRT4577_97834C.1.pep
ASRGRAVAVVVLGRRNNLVVEPAACRAGSTVATRSTAEGTVSSKGPGAGADGAANAAVFGGAHPVRVVINSVTGTLFFLNCVTIIFFLLFLLFNLLYYYLFIFLIFIFLIFLFIIYNFLF

SEQ ID NO: 366961 - protein, 76 aa, Zea mays
  Clone ID: MRT4577_97835C.1.pep
DPNGGFTGAFQTFKSPFFLKPLFLEIPQTEVKRGPTLPGEDFLCWKKKGYISRLGGGFNFLFSRLGTGKPEITSIV

SEQ ID NO: 366962 - protein, 80 aa, Zea mays
  Clone ID: MRT4577_97836C.1.pep
KCNLLFLVGLIHHPKNFIIELQLISDLRERSTNDVLLVAGSWVCQSKLDKGQLIVVVVTGLRRYPPTDGTKSATVAPRVR

SEQ ID NO: 366963 - protein, 71 aa, Zea mays
  Clone ID: MRT4577_97837C.1.pep
HLLPSLIFTTDYGSSKPLMQQIIVAVTSCIVAEASRSEHIKIYRQFIPCELFISSAHFSLWICEYECCGCR

SEQ ID NO: 366964 - protein, 60 aa, Zea mays
  Clone ID: MRT4577_97838C.1.pep
VSGREGKRPRLVGPNGMFRGNRRSPARTPRPSHEPKDAAKRGGRVPGAITNGHPVGPVFL

SEQ ID NO: 366965 - protein, 55 aa, Zea mays
  Clone ID: MRT4577_97839C.1.pep
IYHCQGGQEPAIAIDASVQVDLVKTNETNPQKVRFHSQIGLGFHELSRVLYVFSN

SEQ ID NO: 366966 - protein, 112 aa, Zea mays
  Clone ID: MRT4577_9783C.1.pep
RASFWTPCSGPPRIGRANPCPQLSSKEPQGKKEGGEEKRGKKKKTLYPCMSRSGPLERFSLLIFGGIDPPQCVRAFVPFPFLFLGNCPPPGPRASHGGGQRFLRSKTVVVFR

SEQ ID NO: 366967 - protein, 83 aa, Zea mays
  Clone ID: MRT4577_97840C.1.pep
MALPGGHGRYTDTGSSYVPSSVCTIHLLIPFYQAKRCDSTGNVLAHANVSAFGIRAHVGAHIESNTKPCLVCCNGQNGIRSCF

SEQ ID NO: 366968 - protein, 313 aa, Zea mays
  Clone ID: MRT4577_97841C.1.pep
MAPGSSIVTVVPESDCGDDDGLSESLGGIMLDVDSASKPWSTSASLANVALSSLCGLNDLLECPVCTNSMRPPILQCPNGHTICSSCKHRVENHCPTCRQELGNIRCLALEKVAEQLQLPCKYQSTGCTEIHPYKSKLKHEELCRFRPYSCPYAGSECLIAGDVPFLVSHLINDHKVDLHEGCTFNHRYVKPNPYEVENATWMLTVFKCFGQHFCLHFEAFVLGMAPVYMAFLRFMGEESEAQGFGYSLEVGGGGRKLTWQGTPRSVRDSHRKVRDSFDGLIIHRNMALFFSGGGRQELKLRVTGRIWREQGQ

SEQ ID NO: 366969 - protein, 116 aa, Zea mays
  unsure (1)..(116): unsure at all Xaa locations
  Clone ID: MRT4577_97842C.1.pep
MAPGSSIVTVVPESDCGDDDGLSESLGGIMLDVDSASKPWSTSASLANVALSSLCGLNDLLECPVCTNSMRPPILQCPNGHTICSSCQHRVENHCPTXCRQELGNITCLALEKVGE

SEQ ID NO: 366970 - protein, 110 aa, Zea mays
  unsure (1)..(110): unsure at all Xaa locations
  Clone ID: MRT4577_97843C.1.pep
MQVFKCFGQHFCLHFEAFVLGMAPVYMAFLRFMGEESEAQGFGYSLEVGXGGRGRAWQGTPRSVRDSHRKVRDSFDGLIIHRNMALFFSGGGRQELKLRVTGRIWREQGQ

SEQ ID NO: 366971 - protein, 511 aa, Zea mays
  Clone ID: MRT4577_97844C.1.pep
MVAVAAGRRAGGVGGRRRSGCGAGQAQQKLLAIAVAARFAEAVAPPSAEASRAGSGGCCVELLECLLGALSVNAAPPPAQHRRAVHSIRRRRPRGGGSADDRHADAPSGRIAGNGASASAAASLYTMQGRKGVNQDAMVVWENFGSKDDTIFCGVFDGHGPNGHLVAKRVRDLLPVKLSANLGKGECKEISTSDVKSGTTKGVATEHRVEDTDASPGNEENGEYPEFFTALRASFLQAFYVMDRDLKAHRNIDCEFSGTTAVTVIKQGQNLIIGNLGDSRAVLGTRGEHNQLVALQLTVDLKPSIPSEAERIRQQSGRVFSLPDEPDVVRVWLPTFNSPGLAMARSFGDFCLKKYGIISMPDVFYHRITDKDEFVVLATDGVWDVLSNAEAVSIISNAPSQASAARFLVEKAHRAWRTRYPTSKTDDCAVVCLFLKTVAASTSSSAVTKDSVKNREMSNGKHSLAVKTSTKVPANLVTAKDEWSFVDGSSGCVALPTLPEPTSVVKDSSKD

SEQ ID NO: 366972 - protein, 177 aa, Zea mays
  Clone ID: MRT4577_97845C.1.pep
MGSGKASSPPGAAAGGSAPPPGGAVVCCMCGDRGVLSELFRCSACSVRSQHTYCTDRYPKAESYGTCNWCLRADGRVASTSNSPRSAGKAAARPPSHGGDTIGSGRSPKVAARGDFASSNLSKPVKKQHAQRILLRRSASDLGSRVPTDHNAPPSPGVARGRPKVRRYKLLEEVISS

SEQ ID NO: 366973 - protein, 87 aa, Zea mays
  unsure (1)..(87): unsure at all Xaa locations
  Clone ID: MRT4577_97846C.1.pep
PSPSNPRLLSXXHVWAHNNPDSPPXPLSPFPRFTHPTNPTYTVLTSKLSTIIIKYRSCLSPEILNTYSLHIMKHTKVLIIHSSKTIF

SEQ ID NO: 366974 - protein, 373 aa, Zea mays
  unsure (1)..(373): unsure at all Xaa locations
  Clone ID: MRT4577_97847C.1.pep
IFCGVFDGHGPNGHLVAKRVRDLLPVKLSANLGKGECKEISTSDVKSGTTKGVATEHRVEDTDASPGNEENGEYPEFFTALRASFLQAFYVMDRDLKAHRNIDCEFSGTTAVTVIKQGQNLIIGNLGDSRAVLGTRGEHNQLVALQLTVDLKPSIXILPKIKKNESFTGEAERIRQQSGRVFSLPDEPDVVRVWLPTFNSPGLAMARSFGDFCLKKYGIISMPDVFYHRITDKDEFVVLATDGVWDVLSNAEAVSIISNAPSQASAARFLVEKAHRAWRTRYPTSKTDDCAVVCLFLKTVAASTSSSAVTKDSVKNREMSNGKHSLAVKTSTKVPANLVTAKDEWSFVDGSSGCVALPTLPEPTSVVKDSSKD

SEQ ID NO: 366975 - protein, 78 aa, Zea mays
  Clone ID: MRT4577_97848C.1.pep
HRTDEPTLMQLASIKFDRRNFILMTTNKLHRRTHIQNAWIQYNMHLMNDPPCKRLTLLMTATETVLKAYDSGNAGGLT

SEQ ID NO: 366976 - protein, 123 aa, Zea mays
  Clone ID: MRT4577_97849C.1.pep
MHQPCSARPMWTHQPCPAWGSGPTMAGPESGPSSMGSDIFGPSWSSDGPSFGFSIPQASNPGLFSDLLGSALEYSRCQSISPIRSCDAPHACRSAGEKPNVNARSCPLWMGCMAVALPNTTGA

SEQ ID NO: 366977 - protein, 143 aa, Zea mays
  Clone ID: MRT4577_9784C.1.pep
MKRAHPDYSSSDSELDETVEVEKESADENGNLSSALGSMSPTTSSQILARKRRRGIIEKRRRDRINNSLSELRRLVPSAFEKQGSAKLEKAEILQMTVDHLKMLHTAGGKGYFDAHALAMDYRSLGFRECLAEVARYLSIIEG

SEQ ID NO: 366978 - protein, 170 aa, Zea mays
  unsure (1)..(170): unsure at all Xaa locations
  Clone ID: MRT4577_97850C.1.pep
VRTSGSPPRPRHADRARLAGGGEGGGGGGGGGGRRGGGEEDGGQPRRERERERRRRRRRKREAAAAASEVXMXKRELLARCMTXPLCRRILRDATTVSECLHTFCRKCIYKKINDEELEHCPVCKIDLGCAPLEKLKADHNIQDVRAKIFSLKRKKGNAEKGESPIAPPA

SEQ ID NO: 366979 - protein, 653 aa, Zea mays
  unsure (1)..(653): unsure at all Xaa locations
  Clone ID: MRT4577_97852C.1.pep
MGRSGTSTVRLLLLGSSFLCVLLVSTSEPASESDDVSALLAFKRAIYQDPLSKLSDWNSKDEDPCAWSGVRCSGLNNRVVALDLSNSSLQGFLAPEIGSLRSLQTLVLDRNTFMGSIPKGIGMLHNLIELNLSSNQLAXPIPSEIGDMAKITKIDLHANRLDGTIPPELGKLGSLLELRLSNNCLTGIVPASNDSDVESASSSDQTGLCQLSQLTNIDLSYNFLVGDVPACLQQIQRSSLVGNCFQNNTSNRPLQQCETNQDRGKDNDADENVQKGLPEPLWLLILEVIAAVSLLCFLTLCTMTGLRRCRARSSGSGTSVPWTRAVSWKENTVISIDDDLLVNVPKISRQELAEACEDFSNIIGSSQETVVYKGTLKDGREIAVVSLSVPVHYWNDYVELHFHKEVIEMSRLSHENVAKMVGYCKESDPFSRMLVFQYPPNGTLYEHLHDGDGWQLSWPRRMKLALAISRALRYLHTELQPPFAVAALTSSSVYLTEDFSPKIIDFERWRYLATKPGFGSLNGGSVNSVTDSRHKRFMDVQANTYAFGVILLELVSGRASVSKDTGGLVDWARKHLEQPEEFGKLVDPRLQSVNQESLGIVCNVANLCIDLEPSRRPSMSMIAAILEEGIEASAATLLRNSSLAWAEAELAIS

SEQ ID NO: 366980 - protein, 55 aa, Zea mays
  Clone ID: MRT4577_97853C.1.pep
RKSARNWSWVFSDVNPRGIGVGFNPTLDQLVQDIGDSFCLQALVGQSNSSPSTGS

SEQ ID NO: 366981 - protein, 106 aa, Zea mays
  Clone ID: MRT4577_97854C.1.pep
ILNHWFISDWSGCKGADVSWLDYGGGTAPAINCSCSDRCRGSTIPRSGSTHPGAEPKHFPLSSNVPNTMGDDGGQSESTEHTFVSLTVLMAEGVGWPRVARPGRPR

SEQ ID NO: 366982 - protein, 34 aa, Zea mays
  Clone ID: MRT4577_97855C.1.pep
NDGVASHCCFRMYFVFVELKTQMFFLLDRIWLGF

SEQ ID NO: 366983 - protein, 56 aa, Zea mays
  Clone ID: MRT4577_97856C.1.pep
LCTFFRYQFIPQMIFLNSLFGYLALLILIKWCTGSQPDTYHVMIYMFLDPAGDLGE

SEQ ID NO: 366984 - protein, 109 aa, Zea mays
  unsure (1)..(109): unsure at all Xaa locations
  Clone ID: MRT4577_97857C.1.pep
APDERAAAAQASSKERASGTSSDPKGGRPWADEADTNRLQEAVRSVQREGPXRGAPEHGPVGCGIKKMTLRVTTGAGPVSMVTLSEARPTQEPSNEYVQGSAVGAFHEF

SEQ ID NO: 366985 - protein, 214 aa, Zea mays
  Clone ID: MRT4577_97858C.1.pep
MAEEPVVGYDGFEAAGDAGAGGAEDNLSMSLGDFMAFLETEPTSPEEGWKEEQQMQPAVNQGCLEMPANTDCSEDLFQSHEEMLENAEFWSKSNYSPVEHLECHMEVNMELNEGEQMIDHTEASRYELFSNDLQSQSRTSNLDNEHFPRDASNHANVEATGPPYDLSNGGISTEHSDWSEIKWGSTDEMLGILVRMMTISLRWAMFVLPIHRYS

SEQ ID NO: 366986 - protein, 50 aa, Zea mays
  Clone ID: MRT4577_97859C.1.pep
RTENSIHYNWFYKHSHNTLKRRGALFISSRINTTITQHDYFRIEPPITLQ

SEQ ID NO: 366987 - protein, 70 aa, Zea mays
  unsure (1)..(70): unsure at all Xaa locations
  Clone ID: MRT4577_9785C.1.pep
LXSRLLPRALSCPLSVRKFPWGLGFVNNHYPPPHLCSHQRQQQSMGHPYLRSLPEELIFRPLPRIPPSSS

SEQ ID NO: 366988 - protein, 72 aa, Zea mays
  Clone ID: MRT4577_97860C.1.pep
RDLFGIRRVKLSRTNVSKQEVYTYSASTMSQSSLQTSTTSVFINSDRFCYCTYLPTSSVLATHSTNCHSTCC

SEQ ID NO: 366989 - protein, 46 aa, Zea mays
  unsure (1)..(46): unsure at all Xaa locations
  Clone ID: MRT4577_97861C.1.pep
GDDCDEESIGAAEAGGPPLGCVRGCELCLRTXARISGKVLDLPARP

SEQ ID NO: 366990 - protein, 124 aa, Zea mays
  unsure (1)..(124): unsure at all Xaa locations
  Clone ID: MRT4577_97862C.1.pep
DGLTGVGGFQIAVTGAVAVASERLRQRGKGRPLARIHSTQGVLTGRPAGGXXLSXXXXXAHRSTAAQKRPGPGVPQRRQDHNRENRNGGRGTGGTGHSGWPSESESLRTGTRPRRRRSTETWTG

SEQ ID NO: 366991 - protein, 98 aa, Zea mays
  Clone ID: MRT4577_97863C.1.pep
KRNSGIAPERLAVCCASASRCHRALPPSSSQELQAVRPPPWSGHAVNPNGEAGLRFRRGGWWRREDYAGVGFYTLSHVCGGGSGGEEVALALVLSFLA

SEQ ID NO: 366992 - protein, 46 aa, Zea mays
  unsure (1)..(46): unsure at all Xaa locations
  Clone ID: MRT4577_97864C.1.pep
QGSAQGSGGQVTGLLGGQIAQQLTALCGLQQPTPXCPFAAAGGVPP

SEQ ID NO: 366993 - protein, 49 aa, Zea mays
  Clone ID: MRT4577_97865C.1.pep
GMRDVIYADFPKLIPYIDQDDGSGSSVPAIINIITEFVGKEPVSLHECK

SEQ ID NO: 366994 - protein, 67 aa, Zea mays
  Clone ID: MRT4577_97866C.1.pep
MAANGEKKMITLKSSDGEEFDEEEAEAMESETIRHMIEDDCADNGIRLSNVNYEILCKVIESCCMHV

SEQ ID NO: 366995 - protein, 120 aa, Zea mays
  Clone ID: MRT4577_97867C.1.pep
MNVVPTAAEICTLGVVYERGLIGIYHDWCEAFSTYPRTYDLIHANGIFTLYKDRCRMEDILLEMDRILRPEGTVILRDDVEVLLKVQRTVKGMRWKTLLANHEDGPNVPEKVLFAVKRYW

SEQ ID NO: 366996 - protein, 62 aa, Zea mays
  Clone ID: MRT4577_97868C.1.pep
TPPMYKCANHKGIKRDPTRALPMQTSVKTPMLSLATRYNLTPRAGEHFVYAPHSTACACVQP

SEQ ID NO: 366997 - protein, 50 aa, Zea mays
  Clone ID: MRT4577_97869C.1.pep
TGKEMLFGALHTSLECSTLFRPFLILYYKRGLYVENLPPFTCLHNTRFLN

SEQ ID NO: 366998 - protein, 88 aa, Zea mays
  unsure (1)..(88): unsure at all Xaa locations
  Clone ID: MRT4577_9786C.1.pep
LRCGAVDAEAYSVISGNLVRTLWTIGTSEKTNPDPLWDKARGTAFHSLXHLTPXIIQDAIPDFWKLNYEFFTNEHNLAVLKAWEAPSR

SEQ ID NO: 366999 - protein, 59 aa, Zea mays
  Clone ID: MRT4577_97870C.1.pep
TVVHHTMSGDAPDSVRWTMLPRPNNPLSIIRLRLTVKIHRTVLCAPYCPLSQLSIWPTF

SEQ ID NO: 367000 - protein, 103 aa, Zea mays
  unsure (1)..(103): unsure at all Xaa locations
  Clone ID: MRT4577_97871C.1.pep
RPSVDCHTXSHIAVKFASWVTKIDXRSGKELEALXKFLKNGDAGIVKMIXTKPMVVETFATYPPLGRFAVRDMRQTVAVGVIKGVEKKDPTGAKVTKAAIKKK

SEQ ID NO: 367001 - protein, 68 aa, Zea mays
  Clone ID: MRT4577_97872C.1.pep
LLSDPFTERSASFYVSWLQTRIQPPPMLTSPQSSTFAIIRITSGTREMSKRNEQPVSDRTGYLRQADI

SEQ ID NO: 367002 - protein, 49 aa, Zea mays
  Clone ID: MRT4577_97873C.1.pep
LTHPVAMHIYSYHCASIIIYGRSGAGDVFHVVRRSFSRRERSSQLLCHR

SEQ ID NO: 367003 - protein, 207 aa, Zea mays
  unsure (1)..(207): unsure at all Xaa locations
  Clone ID: MRT4577_97874C.1.pep
WRTRAWVAPWCFAGGXXRRTLXRAAHFFCSGRXGVXLMWGGWDVSIFFAXPGLRGLLPRGVRCRRXVREALNXTPRRDQPREPRXRRPANLRFQEPRAXRGGAAALQRAANARAAFPLQVGGVSDPPTXHQRPPPTASRXETETLNXATTGRAAAHLRDESIYLSRAYVRAPAGVGPVHDHXSSXXYXXESSRPLRVLPYCVRVPYY

SEQ ID NO: 367004 - protein, 64 aa, Zea mays
  Clone ID: MRT4577_97875C.1.pep
SNLSISSRDGLSTLACVWGGHGVQEGAGTKQVVVVCWGRRRAEDLIVVLVPWRGGRGSDGGRGG

SEQ ID NO: 367005 - protein, 259 aa, Zea mays
  Clone ID: MRT4577_97876C.1.pep
MAASASSLLADAASSSCGAISPRPRLLRGAPAAASVPSPSRHSCCSLRASPARRHRSRFVASAVPTMQPPAESRVSTVVDVDLGDRSYPIYIGAGLLDEPDLLQRHVHGKRVLVVTNTTVAPLYLEKVAWALTHNNPNVSVESVILPDGEKYKDMDTLMKVFDKAVESRFDRRCTFVALGGGVIGDMCGFAAAAFLRGVNFIQIPTTLMAQVDSSVGGKTGINHPLGKNLIGAFYQPQCVLIDTDTLNTLPDRELASGI

SEQ ID NO: 367006 - protein, 86 aa, Zea mays
  unsure (1)..(86): unsure at all Xaa locations
  Clone ID: MRT4577_97877C.1.pep
FEGHPQPVXFRIFTRXGTQXPPXCSPRPPDPLPPYNYRSPPLFHGRGVLHLPLSTGSIWGVQICFSVHCFTPVFEFLPRLSIIIVS

SEQ ID NO: 367007 - protein, 78 aa, Zea mays
  unsure (1)..(78): unsure at all Xaa locations
  Clone ID: MRT4577_97878C.1.pep
VCWXSLVAVVTTQSTFFFFFFFFFFGLEPQRRTVNCSIMIVHQILSLTTKLELNVCPSSNTLLLGGPRTFCFXPGXRA

SEQ ID NO: 367008 - protein, 91 aa, Zea mays
  unsure (1)..(91): unsure at all Xaa locations
  Clone ID: MRT4577_97879C.1.pep
VLGKTGAYSETLIFFVYFFFCFCFCFFVLVFRDRVSLCSPGCPGTHSVDQAGLELRNLPASASXVLELKACATTPSVFLFCFVFCSTFLAY

SEQ ID NO: 367009 - protein, 44 aa, Zea mays
  unsure (1)..(44): unsure at all Xaa locations
  Clone ID: MRT4577_97880C.1.pep
PVSVSYHVPQERFLKYLRGPXNIYYNTLDATLHYRYSQLSHASF

SEQ ID NO: 367010 - protein, 167 aa, Zea mays
  Clone ID: MRT4577_97881C.1.pep
SLASREGRKKISERMKLLQDLVPGCSKITGKAVMLDEIINYVQSLQRQVEFLSMKLATVNPELGFDIEQIISKQMLLSQDRHLAFYGVDPGSSGLTGPFNQGIMQPALMCTISNPADVLHGAIHDVSTMNQIPSMWEGLQNMPQMNFNPGVAADSGTNNSGSMKIEQ

SEQ ID NO: 367011 - protein, 62 aa, Zea mays
  Clone ID: MRT4577_97882C.1.pep
RQLLHLKSYPIRALYKGRGRLAASAADSLSYSLNRSLLMDSLHFHIIKPALPVQGFSKEIFI

SEQ ID NO: 367012 - protein, 1635 aa, Zea mays
  unsure (1)..(1635): unsure at all Xaa locations
  Clone ID: MRT4577_97883C.1.pep
MDKENKGLDRTKVDKINELIDALNEKDRLLEKCKDFDVDACNEHASIIAKLNNEVASLNAQLKTCMNNYEKLKFARDAYIVGRHPSIKDGLGFRKETKNLTRPVVHRTVRSFTVIDPHLINLIRENPRYTKMMPEEILRKFVSGRMMVKEARYVDDALNGPLPVYEPQPVALKATSSREPLPSKVQEKHGKREKKKNYRKAKGEAHIGKEWDSDCSSSDSEDEGLAALAFNKSSLFPNKRHTCLMDKENKGLDRTKVDKINELIDALNEKDRLLEKCKDFDVDACNEHASIIAKLNNEVASLNAQLKTCMNNYEKLKFARDAYIVGRHPSIKDGLGFRKETKNLTRPVVHRTVRAGGSNLWRFLTNKKRLLKKRTVMDPKGKGMVINNTEKESLLNEPKEDKPTDSGSSHKKRDGKKKRRIKKIIYYDNDASSSSLRDDDDDSSSKKKTVNQNYSFDYSRILYNSNAHLLSIPLGKPPHFDGEDYSFWSHKMCSHLFSLHPSIWEIVENGMHFESTYNPVFINEQINKNAQATIVLLASLCRDEYNKDTLKISHEGNDATMITKMKLVEGELGRFAMIRGEEPTQTYNRLKTLVNKIRSYRSTRWTEHDVXSDSCSGHSLLLXHLINLIRENPRYXDDARGNPQKXPQPIALKATSSREPLPSKVAQVEAVGLNEDEMALIIKRFKTALKGRKEYPQQERVKGNAPASNEVQEKHGKREKKKNYRKAKGEAHIGKEWDSDCSSSDSEDEGLAASTFNKSSLFPNKRHTCLMDKENKGLDRTKVDKINELIDALNEKDRLLEKCKDFDVDACNEHASIIAKLNNEVASLNAQLKTCMNNYEKLKFARDAYIVGRHPSIKDGLGFRKETKNLTRQWTSGLNKEKWKAPMASSSYSSHDQKNHAYLYAHVKKVYAYGDSSWIIDNGCTNHMTGEKKMFTSYVKNKDSQDTIIFRGGNKGKVQGLGKIAITTEHSISNVFLVESLGYNLLSLKVKKIRSDNGSEFKNLQTEEYLEEEGIKNEFSAPYTPQQNGVVERKNRTLIDTARTMLGEYKTPEQFWSEAVNTACHAINRLYLHRLLKKTSYELLTGNKPNVSYFRVFGSKCYILVKKCRHSKFAPKAVEGIVEVSSDVVFDETNGSPREQADLDDVDEDEVMXPQELQEQDQPSSSTMVHPPIQDDEXVEEALQDPDWMLAMQEELNNFKRNEVWSLVPRPKQNVVGTKWVFCNKQGEHGVVTRNKARLVAKGYAQITGLDFEETFAPVARLESIRILLAYAAHHSFKLFQMDMKSAFLNGPIKEEVGKADPTLFTKTCDGDIFMCQIYVDDIIFGSTNQKSCEEFSRVMMQKFEMSMMCELNYFLGFQVKQFKEGTFISQTKYTQDLLKRFGMKDAKPAKTLMGTDGHLDLNKGGKSVDQKEYRSMIGSLLYLCASGPDIMLSVCMCARFQSDPKECHLVDVKRILRYLVSTPCFGIWYPNGSTFDLIGYSDSDHAGCKVDRKSTSGTCQFLVRSVVSWSSKKQTSVALSTVEAEYVAAGQCCAQLLWMRQTFGDFGYNLSKVPLLCDNESAVRLADNPVEHSRTKHIDIRHHFLRDHQQRGDIDIYHISTENQLVDIFTKPLDEKRFCRLRSELNVLDSCNLD

SEQ ID NO: 367013 - protein, 98 aa, Zea mays
  Clone ID: MRT4577_97884C.1.pep
NSRADELFVCGRPPPFFLGFFPAGPGSYPGEDENQRLGTKEAMHRISAADDFINPPPHRLGTYTPGRSIPRLAPHRSPWPTWAWSMHTRTNGGMDPRP

SEQ ID NO: 367014 - protein, 943 aa, Zea mays
  unsure (1)..(943): unsure at all Xaa locations
  Clone ID: MRT4577_97885C.1.pep
MDPKGKGMVINNTEKESLLNEPKEDKPTDSGSSHKKRDGKKKRRIKKIIYYDNDASSSSLRDDDDDSSSKKKTVNQNYSFDYSRILYNSNAHLLSIPLGKPPHFDGEDYSFWSHKMCSHLFSLHPSIWEIVENGMHFESTYNPVFINEQINKNAQATIVLLASLCRDEYNKDTLKISHEGNDATMITKMKLVEGELGRFAMIRGEEPTQTYNRLKTLVNKIRSYISTRWTEHDVVRLMLRSFTVIDPHLINLIRENPRYTKMMPEEILRKFVSGRMMVKEARYVDDALNGPLPVYEPQPVALKATSSREPLPSKVQEKHGKREKKKNYRKAKGEAHIGKEWDSDCSSSDSEDEGLAALAFNKSSLFPNKRHTCLMDKENKGLDRTKVDKINELIDALNEKDRLLEKCKDFDVDACNEHASIIAKLNNEVASLNAQLKTCMNNYEKLKFARDAYIVGRHPSIKDGLGFRKETKNLTRPVVHRTVRAGGSNLWRFLTNKKRLLKKRTVMDPKGKGMVINNTEKESLLNEPKEDKPTDSGSSHKKRDGKKKRRIKKIIYYDNDASSSSLRDDDDDSSSKKKTVNQNYSFDYSRILYNSNAHLLSIPLGKPPHFDGEDYSFWSHKMCSHLFSLHPSIWEIVENGMHFESTYNPVFINEQINKNAQATIVLLASLCRDEYNKDTLKISHEGNDATMITKMKLVEGELGRFAMIRGEEPTQTYNRLKTLVNKIRSYRSTRWTEHDVVRLMLRSFTVIDPHLINLIRENPRYTKMMPEEILRKFVSGRMMVKEARYVDDALNGPLPVYEPQPVALKATSSREPLPSKVAQVEAVGLNEDEMALIIKRFKTALKGRKEYPNKNESRGXRSCFKXRKAKGEAHIGKEWDSDCSSSDSEDEGLAALAFNKSSLFPNKRHTCLMDKENKGLDRTKVDKINELIDALNEKDRLLE

SEQ ID NO: 367015 - protein, 84 aa, Zea mays
  unsure (1)..(84): unsure at all Xaa locations
  Clone ID: MRT4577_97886C.1.pep
VIATSYRWPLPLCSSPRSIPPTPHGAPRHMSLRSSHSLSXFDCTLPRNYGFDLLGLSDSDGTGGFIXPKWMAYGDVINGRHAML

SEQ ID NO: 367016 - protein, 102 aa, Zea mays
  Clone ID: MRT4577_97887C.1.pep
KLGTSLAGQPPEFSLPHAFCNLATNNSKNWGVAQHLASFLMLNLFLTTLRHKMGCFNVLKVSITNKKTSSCGRGLTTSKGQNTKRMIRIIYYPSTKLKLGKN

SEQ ID NO: 367017 - protein, 64 aa, Zea mays
  unsure (1)..(64): unsure at all Xaa locations
  Clone ID: MRT4577_97888C.1.pep
QFTAMFRRKAFLHWYTGEGMDXMEFTEAESNMNDLVSEYQQYQKAFIFDSEDEYDEEAPFEAEE

SEQ ID NO: 367018 - protein, 91 aa, Zea mays
  Clone ID: MRT4577_97889C.1.pep
PSESAGIPSLAVLHTQTTCAPADAALGTTPHHSRFSVPHRTQNPPRATTTTVTMAAARYDVEKGGRNNGDGKPSPPGGGDLYPQRDGEREW

SEQ ID NO: 367019 - protein, 57 aa, Zea mays
  Clone ID: MRT4577_9788C.1.pep
KNTPTKTNSTFHFPNFYSSTSSSDLATITSPPQQSNVPDEALNVSNQLPRITSIERD

SEQ ID NO: 367020 - protein, 67 aa, Zea mays
  Clone ID: MRT4577_97890C.1.pep
ASAAVRLGMVRLGTYDLDLAHGSVDPPSALNRFLLPFQQHTSSTKAVLHLLMLGFNVDIVVDVIELG

SEQ ID NO: 367021 - protein, 69 aa, Zea mays
  Clone ID: MRT4577_97891C.1.pep
HAWADFVCSPAGTYPSTSLGGTALTAANLYLASIYMGAGPALAGGSEPDPTLTNLEAKSCAHSLRQNSA

SEQ ID NO: 367022 - protein, 89 aa, Zea mays
  Clone ID: MRT4577_97892C.1.pep
PTCANATPSTSRSIDSLVAYQHRISSVSTQSGHMDHCFVVLPSVHIDLAFRFFDVGPATFLTQPHLGPVLPHGCVLRRSSLSAAALACL

SEQ ID NO: 367023 - protein, 67 aa, Zea mays
  Clone ID: MRT4577_97893C.1.pep
AQYAAQVPALAQDSHIDQIKIAAPAYSATWEFYIDVKSPPFPLFLWEKKKKKWGRRKKSYDAALASS

SEQ ID NO: 367024 - protein, 119 aa, Zea mays
  unsure (1)..(119): unsure at all Xaa locations
  Clone ID: MRT4577_97894C.1.pep
IRHEGSHRHLARREERGVSNPNPTRPCRHSHGCRRRALPLPRAPRIPHQAFSLTRRCPARRIPEASQAPPSPGGGHHRRHRHADSPVPVAADEEVEEGEILEDATAVCAMEVGAXSAVR

SEQ ID NO: 367025 - protein, 49 aa, Zea mays
  Clone ID: MRT4577_97895C.1.pep
FPVLQHPSLLGKTIFLYSGATLPYNIPFFFLLSLNLSFYNYFIYITILI

SEQ ID NO: 367026 - protein, 45 aa, Zea mays
  unsure (1)..(45): unsure at all Xaa locations
  Clone ID: MRT4577_97896C.1.pep
TYVMPLYVLLKIRLHSLXLLRPHQATHLQVQRREGRGAGGQCQGR

SEQ ID NO: 367027 - protein, 66 aa, Zea mays
  Clone ID: MRT4577_97897C.1.pep
RQFLSVTEPDVKCAFPGASQPNPDENLFRRGAWGTFRLDAVMDHTTEAQITDLMTITHNVLNELIR

SEQ ID NO: 367028 - protein, 52 aa, Zea mays
  Clone ID: MRT4577_97898C.1.pep
LISTFYAIESVILTSSGSGYLQRYLPMEIDIPIEIPSNGVRYRQVSDCFLSN

SEQ ID NO: 367029 - protein, 55 aa, Zea mays
  Clone ID: MRT4577_97899C.1.pep
ARAIYKLVSMIHCIILLLSLSNIVWIHISLVTKVISKRYYDTPNWIVTLDNVTYN

SEQ ID NO: 367030 - protein, 114 aa, Zea mays
  Clone ID: MRT4577_9789C.1.pep
FFFFFFFFFFFYILFPERAIGVTHIGSRQRDERLGSKTSFPKTPRKTEPKKRNGFKLGVTPRAYARAFHWCMFLNQMLQRCGTLLYRFLNPEPRALGKGPKKGGNTAQGKNTVG

SEQ ID NO: 367031 - protein, 99 aa, Zea mays
  unsure (1)..(99): unsure at all Xaa locations
  Clone ID: MRT4577_978C.1.pep
AIMDADLNKNVPWDLPIKEKKGDKECYLFYQNDPKFPTELRANRANXDGYWKETGEDNEVYNAAERVAVLITMKMNLGLYTGGDTTSDKINXGMLEYRL

SEQ ID NO: 367032 - protein, 117 aa, Zea mays
  Clone ID: MRT4577_97900C.1.pep
MGRLKVREGGGPGLRTENGFLGRKGWEFNADPGTPEERAEGERLPQEFTRHRFQRKESQDLLLRMQIESLFAKPLNKEQMEAIMELANQGKGKKGSRSRGSKVSPLKAPIIEAVPKI

SEQ ID NO: 367033 - protein, 124 aa, Zea mays
  Clone ID: MRT4577_97901C.1.pep
MDMPIKPEMSVWGALLHGCRMHGRSDMALAECAAQHIFELEHSNAGHYVQLANLYASAGMWSHVAGVRVSMRERGISKATGWSSIDINGEMHSFHAGDHSHPRAAEIFALLNLLSPTPFESGGG

SEQ ID NO: 367034 - protein, 122 aa, Zea mays
  unsure (1)..(122): unsure at all Xaa locations
  Clone ID: MRT4577_97902C.1.pep
GVSLFLGRFFFFHFHRENVAKQVPAQNGQTPFYPGPERPKEFPALLNSNDPVGFNLVXVLPLGLLGHIVPYYILPPSTNGYDPPFFLPVVQDFFSTHPFACVFPFHVSDQSSSTFSSSATPK

SEQ ID NO: 367035 - protein, 104 aa, Zea mays
  Clone ID: MRT4577_97903C.1.pep
SRCQLCYFIPPPRQLIGTKATRSRLLLAWHQFNSRTQYNRRGRRNLLQQTQLISTRTTNKPTWSYPRRYQQSQWFMNRVYNCLLPIPFALSRCDLEHQTFEATG

SEQ ID NO: 367036 - protein, 67 aa, Zea mays
  Clone ID: MRT4577_97904C.1.pep
NCVTQGSKLGQMSPLPCTGNIHYFTMGTRTKNSLAYDWPLKKICGRGGPFLLVGKWKPPLSLFSLTR

SEQ ID NO: 367037 - protein, 532 aa, Zea mays
  Clone ID: MRT4577_97905C.1.pep
MAPASSSSAGVACLVLLLLLLLAGASAAHGSFQARRALSDDHGSGIVARWRRLLADAATPANNSLVLAAARTHRSDPFANLTAYSGGWNISDEHYWASVTYTAVPLFLMAVLWFVGFGIVMLVISCCCCCFCRGKNDAYSPGCYLSSLVLLIIFTMATIAGCLILHGGSDLFHGSTIRTVEYVFGQGNLTVDHLRNFADSLAAAKDITINQIFLPADVQQKIDVVEEKLNSSAGVFSTRLQENSRKIKGVLNHMEHELFAVAAVMAGLSILGFLFSVLGLRFLVSLLVIAAWILLTNTIISSGLFLLLHNVVADTCVAMGDWVAHPQAHTALDDILPCVDVATANESLYRSQEVTSQLVALVNNVVVNISNRNFPPGLRPLYFNQSGPLMPVLCNPFNPDMSPRRCAPGEVDFGSAAREWKRFECQTTGPPGSELCATPGRVTPAAYGQMTAATSVSKGLYEFSPFLVQLQDCSFVRETFTSITNYNCPGLEQYSRDVYVGLVVISAGVMLSVVFWMVHTRHRRRRAMRKQL

SEQ ID NO: 367038 - protein, 520 aa, Zea mays
  unsure (1)..(520): unsure at all Xaa locations
  Clone ID: MRT4577_97906C.1.pep
MESPQQQAPPPSQGASSGSCDAPLQLAARYGATVPRTSSPPASVTRPEVNNRMELKSSNSETLCDSLTLNTVSVMLTVSFFREDGDGGTDVFLGFSCVLGFIIRKYLWVLRSESARFTGLDIYTNTVVLVVTAYAMLLANSLQYIILAPFPISVAAFIAYLYKERLEHHGSSGADQQDNKDGCKXGTAMARKPGSSKWWXAPYSMLLISAIVMPYEDSPVLLSHFLLFSCCALGTLALLYSRLAEASPALRPALECIQMAYMVTLFITVHTVAAEWLGDVMALVTMPELIAGLVWFCNLLHGDTACNTAAVAHILRSDEGSSSSSDATHHQVPTNSETRQGFVFDGSMFTPLGAVLAGLVTSTFAHDEELLASWNTKATVACSIAGCLPYLSIWMVSRWPGRIPSSDKATRLLKFAANVCLTGAFLMLFALLDEKALAYRLFGLDEIIDPSQLKYLPAVHFSTAVALYFFRKHLAGALANLGEELGNLLSLLIAASPTEKQGRKRRRKKKTASTDVRRRR

SEQ ID NO: 367039 - protein, 40 aa, Zea mays
  Clone ID: MRT4577_97907C.1.pep
AFATQMHYASTQSTMYVTWSSLDKPDHLNCQEALSKHEHK

SEQ ID NO: 367040 - protein, 32 aa, Zea mays
  Clone ID: MRT4577_97908C.1.pep
MIIRMGELYPFSLDNQHYILYPTAHTVSSNID

SEQ ID NO: 367041 - protein, 823 aa, Zea mays
  Clone ID: MRT4577_97909C.1.pep
MDLTPSFNSLDSNGIPNSPDVDPALGETGGSEGLQKIDGESQLDWDSIIVSDVLDDEGRVQVPTENEIYFNLGLNKGDEAANNRFSGSGTNCHAQGSLDTDNEDHHADQPCQDYIPDEKRVVYNRMNPSMQPGCLFPNMKEFRIAMRQYAIKHEFELGIEVTSTTRYVGYCKGGDCPWRIYAREEKKGLPTIVVAVLDDVHTCTSSGRRRTTTPTCGWVAFHAKPLLMKKPQMGAKELQQTLQTTHNVTIGYDTVWKGKEKALRELYGSWEESFQLLYSWKEAVIAVMPDSVIEIDVILEDGKYYFSRFFCAFGPCISGFRDGCRPYLSVDSTALNGRWNGHLASATGVDGHNWMYPVCFGFFQAETVDNWIWFMKQLKKVVGDMTLLAICSDAQKGLMHAVNEVFPYAERRECFRHLMGNYVKHHAGSEHMYPAARAYRRDVFEHHVSKVRNVHKIAEYLDQHHKFLWYRSGFNKDIKCDYITNNMAEVYNNWVKDHKDLPVCDLAEKIREMTMELFHRRRRIGHKLHGIILPSVLAILKARTRGLGHLSIVKCDNYMAEVRDSTNCMTKHVVNAELKQCSCEEWQHTGKPCQHGLALIIAQDSRDVGMENFVDDYYSTERFKIAYSRRVEPIGDRSFWPSVDFASGVFAPIARRGLGRQRKNRIKSCLEGGSARNKSTNENEKTKKRLKRQYTCPNCGELGHRQSSYKCPLNGTKKRKRKPRINTTKNWIPKELRTSSQNVPVQPDVAEEVTEQELEDPQPETEQLGLALFQPLGAQITEQEADEPAEQAPPASPPPTRKWLVKKITPKKRLRISAQQKQY

SEQ ID NO: 367042 - protein, 97 aa, Zea mays
  unsure (1)..(97): unsure at all Xaa locations
  Clone ID: MRT4577_9790C.1.pep
VWXRXXGXXXXXXFAXXLSFSXAXGXAXCXXLGXXLXLXSRXLAWSXXXPLXCXSSXAXAXPSPWXLALSASXCCXPAAXFGRCCVCFLPPPSLCGP

SEQ ID NO: 367043 - protein, 50 aa, Zea mays
  Clone ID: MRT4577_97910C.1.pep
CRVDPPRCPLSGLSNPRHDGWFPVGMPSSRGPPSAWGLGKKGLTPLWRLV

SEQ ID NO: 367044 - protein, 114 aa, Zea mays
  Clone ID: MRT4577_97911C.1.pep
FSAASRALVPLLPHPRSLCHLESTYDRHMSIALRMILSFVKSFGPTISSALLAIPPVGVDLEAEQRMEWCNLCFQELKNVSVSLKFLTRRQGEVGRLAQELSLFLQDLFQLSSV

SEQ ID NO: 367045 - protein, 38 aa, Zea mays
  Clone ID: MRT4577_97912C.1.pep
HVGPTLPAPTPRLGAATADTKWLGTVKDQACRSTCKAS

SEQ ID NO: 367046 - protein, 77 aa, Zea mays
  Clone ID: MRT4577_97914C.1.pep
LICGVFLHSLPSVSLLPLKLNKLMPPIHVVRVMLSILAKRQGNNNYIINRILLFYICTPAATAPLPVQFIFMNHIYI

SEQ ID NO: 367047 - protein, 61 aa, Zea mays
  Clone ID: MRT4577_97915C.1.pep
NHIKPATHNHAYFILLCSGGKGIDHALALVLFHGFVCVWPVSDLRMTAFGWFVCPRFKSAV

SEQ ID NO: 367048 - protein, 63 aa, Zea mays
  Clone ID: MRT4577_97916C.1.pep
SPQAANSGGRPELVSRSLSSTYLSEGSIPCNAQPVASGTDPVQIQAHKQAHKQAHKSAQRFQP

SEQ ID NO: 367049 - protein, 53 aa, Zea mays
  Clone ID: MRT4577_97917C.1.pep
PNLHCLPAQPITRVGGTKILIYLPKSKPRQHNVLTTTLGRNSISESPKPFLNF

SEQ ID NO: 367050 - protein, 91 aa, Zea mays
  unsure (1)..(91): unsure at all Xaa locations
  Clone ID: MRT4577_97918C.1.pep
LAGCXSLFLGCVPGRPGWLLAPRGSXGSGPAGALPLPGVPFPCSWARSVAVVASPXFLSGGXAAPFSXWAAPGSLAVXRXXLVGFFRPRGS

SEQ ID NO: 367051 - protein, 216 aa, Zea mays
  unsure (1)..(216): unsure at all Xaa locations
  Clone ID: MRT4577_9791C.1.pep
MLTSFAWTWCLSPPAIPVLSMFLTELLTEDLPRLFVRPKKIVLDFQKGRAMGPVSGSVASDIIQNVATDLIQEGNKDFVGELSVTLVDARKLSFVLFGKTDPYVVMIIDDQVIKSKKNSQTTVIGLPGEPIWNQVKLQLSEHVCFLKTYFMHDIMLIDTTSXDFHMLVAXPRKQKLTIQVKDSIGLTDITIGTGEVELGSLKDTVPTDXIVTLYGG

SEQ ID NO: 367052 - protein, 59 aa, Zea mays
  Clone ID: MRT4577_97920C.1.pep
IAISKTALVRWFGYSTTFSFHLYTRKKKRKPKPDTNTTNICINNIKKKKNIKPLTKTQP

SEQ ID NO: 367053 - protein, 306 aa, Zea mays
  unsure (1)..(306): unsure at all Xaa locations
  Clone ID: MRT4577_97921C.1.pep
MLRGLHGRPSPRSSVHGEHGAGLPKSPPPPPRPRDPLPHARSALQHTPSAWARHQPSTFSVMSQEEYSQVTDGKFYVIRLLFTLAAAISAALLLVASLRRRAPPPGLPAKLVPSSHMAGHNRSFVLWLHDLGDSGPANESIRNLFSAPEFRLAKWSFPSAPRAPVSCNNGFVMLSWFDIHELPMSAVRSLHSISNQINQGTGILMXCNFERXGSPQDETGVLKAVEKVHAMIDREVADGIHPENIFVCGFSQGGALTLASILLYLKKLGGGAVFSGWVPFSSSVTERISPESEEGNQYFHPFVSSL

SEQ ID NO: 367054 - protein, 239 aa, Zea mays
  unsure (1)..(239): unsure at all Xaa locations
  Clone ID: MRT4577_97922C.1.pep
MSSLIRLLFTLAAAIGAASLLVASLRRRAPPPGLPAKLVPSSHMAGRNRSFVLWLHGLGDSGPANEPIRNLFSAPEFRLAKWSFPSAPRAPVSCNNGFVMPSWFDIHELPMSAGSPQDETGVLKAVEKVHAMIDREVADGIHPENIFVCGFSQGGALTLASVLLYPKKLGGGAVFSGWVPFSSSVTERISPEAXEAGQAGPPFLQSAGVNCEFKAYPDLGHSLSQEELLYLESGIKSRL

SEQ ID NO: 367055 - protein, 221 aa, Zea mays
  Clone ID: MRT4577_97923C.1.pep
MAGRNRSFVLWLHGLGDSGPANEPIRNLFSAPEFRLAKWSFPSAPRAPVSCNNGFVMPSWFDIHELPMSAGSPQDETGVLKAVEKVHAMIDREVADGIHPENIFVCGFSQGGALTLASVLLYPKKLGGGAVFSGWVPFSSSVTERISPEARKTPFLWSHGMADKVVLFEAGQAGPPFLQSAGVNCEFKAYPDLGHSLSQEELLYLESWIKSRLNASQEKDG

SEQ ID NO: 367056 - protein, 120 aa, Zea mays
  Clone ID: MRT4577_97924C.1.pep
PHASGKMVTTVTDRGNRVGIAVYRKPTDNSCYEARSETNPPLCGEYDDPDAAWNISLGACMHKLPVDATGRGSQWPELWPLGLERPPYWVRGFGGRRHRRRRLRTLLEARGEEGGRACAQ

SEQ ID NO: 367057 - protein, 104 aa, Zea mays
  Clone ID: MRT4577_97925C.1.pep
PFPTTSFLRGGSNFKPAGGGVLKGEGAFKGPLGTPHPRKKGTAPLPFCLQRGPGGLWPKKETFLGAPPPLCPGKRTRGHPPWGSRTPGYTPEIRAGTSGGPHFP

SEQ ID NO: 367058 - protein, 67 aa, Zea mays
  Clone ID: MRT4577_97926C.1.pep
SHISGRESPALRRLRHGSRIPGATEPPRRLDRRSPHTHMIRLAPAGPGYRMAPPAGPLPSRRPVLKQ

SEQ ID NO: 367059 - protein, 351 aa, Zea mays
  unsure (1)..(351): unsure at all Xaa locations
  Clone ID: MRT4577_97927C.1.pep
MGGLTMDQAFVQAPEHRPKPIVTEATGIPLIDLSPLSASGGAVDALAAEVGAASRDWGFFVVVGHGVPAETVARATEAQRAFFALPAERKAAVRRNEAEPLGYYESEHTKNVRDWKEVYDLVPREPPPPAAVADGELVFENKWPQDLPGFREALEEYAKAMEELAFKLLELIARSLKLRPDRLHGFFKDQTTFIRLNHYPPCPSPDLALGVGRHKDAGALTILYQDDVGGLDVRRRSDGEWVRVRPVPDSFIINVGDLIQVWSNDRYESAEHRVSVNSARERFSMPYFFNPATYTMVEPVEELVSEDDPPRYDAYNWGDFFSTRKNSXSNFKKLNVENIQIAHFKKSLVLA

SEQ ID NO: 367060 - protein, 101 aa, Zea mays
  Clone ID: MRT4577_97928C.1.pep
GVKISPKKNPRPAKKPNRIGGPVIFGDRDPSQRVFKKLHLEGIWEKCSHPCLIQTPWGGTKPRDLGRNLEEGGINIYRSINQVPGNIFYKPGGWDPSPPNL

SEQ ID NO: 367061 - protein, 41 aa, Zea mays
  Clone ID: MRT4577_97929C.1.pep
IKVPSKARRGSGYGPFWLVTMEPGKFFRLNSRVLYQKSLRV

SEQ ID NO: 367062 - protein, 114 aa, Zea mays
  Clone ID: MRT4577_9792C.1.pep
MSIENLKTYDPFAEADEDTGETKQTQNYIHIRIQQRNGRKTLTTVQGLPKKFDQKKILKVIKKKFACNGTIVNDSEMGEVIQLQGDQRKDVQEFLIDKKEGLELDAKTIKVHGF

SEQ ID NO: 367063 - protein, 71 aa, Zea mays
  Clone ID: MRT4577_97930C.1.pep
HQMEGPNDNDHHYASISTFRGCSSPAKDSKKTCAPARASASVAQSSQRQGEREREGEWRRRSGRKPSPGVR

SEQ ID NO: 367064 - protein, 121 aa, Zea mays
  unsure (1)..(121): unsure at all Xaa locations
  Clone ID: MRT4577_97931C.1.pep
ARAQAYIQKHRELXQDLSYEMVEIARHLQASRFMMTQSVQHPNKILDSIKRAVLHSVTSTVHVTSRCAEVYSVASKTTCFQXLYMFVMSGMFAMEKLLIRVVKLIRCVVGAQIVITLVIVS

SEQ ID NO: 367065 - protein, 233 aa, Zea mays
  unsure (1)..(233): unsure at all Xaa locations
  Clone ID: MRT4577_97932C.1.pep
LGPSRPAGVLYRPAGDPEMWLPFPYPPPASVYVTVMSVVSLLSAANAGLSELRGNHVSYSKFWHVAAAAGGDGSNKQRARGGGGAVLTGRDGMLVTYAPAFAAAAASFAVPGAVEGARARLLSAALTAHFLKRLLEVLFVHRYSGSMPLGTAVGGAANYLVATATMVYAQRLSRSVQDPPVDLRXPGVVVFAVGLAGNFYHHCLLSRVRADGGGSKGYKIPRGGVVGLVACPN

SEQ ID NO: 367066 - protein, 137 aa, Zea mays
  unsure (1)..(137): unsure at all Xaa locations
  Clone ID: MRT4577_97933C.1.pep
MQFGTPLPPAARXHPPSTQTPPPTXEAAPRRAPAATPCALPRFAGPRPPRRSRPRYRARPPATPRRPSAPXRSPPPTFPTPXPAPPVPXPTVPRPSXEPPPPRAPAPAPAPPLPAPPTPQPPLLHFPPRFPLQSPRH

SEQ ID NO: 367067 - protein, 88 aa, Zea mays
  Clone ID: MRT4577_97934C.1.pep
PCLSFRLLYCSTPLMAITKPAPLRFLAQLIKATPRPRTPPFPQLLVHALSPCFSHSSHASALLLLFVVLRNTSPELRPSPSRHLTSAS

SEQ ID NO: 367068 - protein, 142 aa, Zea mays
  unsure (1)..(142): unsure at all Xaa locations
  Clone ID: MRT4577_97935C.1.pep
ESYAAPAQTPREDPAVQTSAWPGKSRGRTAAAGDEQSEREARPRARHGXRSRARWEFRASARXEYREQRARLHASGQREGRPARRGPRRLGTRRGGSRELHGTDEIQAGGRSARAGSTRMPGRATQGGNRAARAGERNWASS

SEQ ID NO: 367069 - protein, 73 aa, Zea mays
  Clone ID: MRT4577_97936C.1.pep
KCEFSQCYRSNRVVIALCHCGLRRRTALCDVHLELVTLPVSKTPSSSHISVPPQLISQETRSESPSNPDANER

SEQ ID NO: 367070 - protein, 90 aa, Zea mays
  Clone ID: MRT4577_97937C.1.pep
PNLVHAQSILAIYTCRVELMGFVEGYRVCGCPLGERLYKVYPGGAFDPLGLADDPDTAFELKVKELKNGRLAMFSKFGFFVQAIVTGKGP

SEQ ID NO: 367071 - protein, 95 aa, Zea mays
  Clone ID: MRT4577_97938C.1.pep
NNLEGHTGRNVLNNILGVGHPSDILLGARALHHRGMHTASACCIECNQKDQQAIALTYANSAYTLHEGTINPEASRAAVQKDRPFDEDENGGDPP

SEQ ID NO: 367072 - protein, 50 aa, Zea mays
  Clone ID: MRT4577_97939C.1.pep
LAPLYSARLEIQQTLYFLPVTIQSLSTIIIDPAWFRLSKSLSFCFSIGRF

SEQ ID NO: 367073 - protein, 70 aa, Zea mays
  Clone ID: MRT4577_9793C.1.pep
GNCPPLLHLGWGSPYSKYALSCSNLCACGIIVHSIISAPLLSSRPIHLVTFARCARACFLVILASSVDPF

SEQ ID NO: 367074 - protein, 43 aa, Zea mays
  unsure (1)..(43): unsure at all Xaa locations
  Clone ID: MRT4577_97940C.1.pep
TLTRNERRNLWAPSQNXLEILVNPEKKKLCEKNLXTDIXNITK

SEQ ID NO: 367075 - protein, 84 aa, Zea mays
  Clone ID: MRT4577_97941C.1.pep
NVEYHCFYRCLAWAMDYHSLHNSFNTYCEVLEYEIILDTKTHRYTRLCFVSFFTDEAMQNAIQGIIGDELDGALITLNKAQSHG

SEQ ID NO: 367076 - protein, 78 aa, Zea mays
  Clone ID: MRT4577_97942C.1.pep
HERQLPILCNPTICRDRHQKKPQALYSTGPLQTTNLDRLYGIFKTVQRVENKARIFEQNATDSECKVDPKVLSKLYDP

SEQ ID NO: 367077 - protein, 48 aa, Zea mays
  unsure (1)..(48): unsure at all Xaa locations
  Clone ID: MRT4577_97943C.1.pep
TPTGRRAXXTXTPSGEIGXAHVRTNGGDRXQXSSEGVRTLIVLLPRAR

SEQ ID NO: 367078 - protein, 181 aa, Zea mays
  unsure (1)..(181): unsure at all Xaa locations
  Clone ID: MRT4577_97944C.1.pep
RKDKDEAEVWCAGLKTLISRCHQRKWRTESRSDLLSSGATSPRTYTRRSSPLSSPFSSNDSIHKDGSDNYRLRTPYGSPPKNGLEKAFSDVMLYAVPPRGFFPSDSNAGSVHSMSSGHSDNTNGHPRGVPMDAFRASYSSAVSSSSHGSGHDDGDALGDVFIWGEGTGEGILXGGGSRVGS

SEQ ID NO: 367079 - protein, 80 aa, Zea mays
  Clone ID: MRT4577_97945C.1.pep
RDPHVVRLYEITCTFRTVHLIQTAPSHFLASHSCTWLCSVIQLPHESLASHPFFATRTACEIPPACPITEVHRAIPAPPP

SEQ ID NO: 367080 - protein, 70 aa, Zea mays
  Clone ID: MRT4577_97946C.1.pep
PTRPGRLKGEGWSLVEGSSYADVRRLKGGGCFFPATGLYMDGLGPEFDSAFCLSNNKSELFLSKNIIVSN

SEQ ID NO: 367081 - protein, 54 aa, Zea mays
  Clone ID: MRT4577_97948C.1.pep
VPVDALNADGSARKEGFVNLNAVQGVHCIFILSCFLSLLIFVCHPFLYLSSSGL

SEQ ID NO: 367082 - protein, 56 aa, Zea mays
  Clone ID: MRT4577_97949C.1.pep
ILKPPDKRTIFMATPTEQKIGFHKTGPPLLDPFYSSPLFFFFFFFFFFFFFFFFQD

SEQ ID NO: 367083 - protein, 95 aa, Zea mays
  Clone ID: MRT4577_9794C.1.pep
SLDTRLLPRGYSLARRRLPQAHQRGPRRRQPGHRLLLVVFVHVLALCIYIGGAEAKPHPMLASDLQDSFFVLICLGIEGNQPWKIQLINVHLWGL

SEQ ID NO: 367084 - protein, 473 aa, Zea mays
  Clone ID: MRT4577_97950C.1.pep
MTNAIWAYEVAPIRTTLAAAMDATKAVVAIVGRVVVDLLASRRRWALVTLLLLSSTTITMALFVVAVRSIIAASWVDYIGYIGLTTYVGYIGLIPTLVDNVILFLFTLTVWSALGGNLAFISEAKLLERVVLKSGNNVVSVMLSACGRSVLHLEDDTDVRADGDRGVGGNDRADGDKAHGPASGEEIVSGGGRAAVESAVLGKIKKNAVPDGSIPISQSAHPPTLGPFTYKPLLADTVQAEDIKELCKLLVVVSGEAAKTYAGQKTKEERVGEKEDEIGGQKEDDRAGSLALTNHDREGNNQDQDQKAPIDDHSSRGTHMGKAIIEESRPNCADDHKTNRPMSPGTLALMCDEEAFEKMCDEQDTMFTTSQNAAPQQTVIVNHNQSALYAEQENVVLTEFRDCLRKFVRYGRMKEERYSMAIKSETSGHPGQVNGVSQVPYSKVDVPAVKTYPQSSSSHLVAGKPVTGLLDKN

SEQ ID NO: 367085 - protein, 135 aa, Zea mays
  Clone ID: MRT4577_97951C.1.pep
PRAVEPVLVFLLGHFPCKNLSHKSLYTPGVYVFQVVQLVHQDLRISSLAMSVLGSLFFVVVPQGPPRPPGSPALSSCPLFPGGRSRLRGFLFFLGSLASKKKKRLPSPLLWIFLFSSPLFAKKTMFRFLEKIGQI

SEQ ID NO: 367086 - protein, 618 aa, Zea mays
  Clone ID: MRT4577_97952C.1.pep
MAGKEQGGGGPPQRPPMPAASMQPPIKKLVRQLDFNSAALAGNPAMAAAAAAVSRALQPRALPAGFQHPQHVRAAVPMVVPQQLHQRALPVMRPHPVVGHVPRHAVPLAVPVPQLRPMPPQPVQRPPVAVPLKPDSPKPWARLYEGKDSTPTKKKCCNCRNSRCLKLYCECFASGTHCDGCNCTNCFNNPENEVARREAIEATLERNPDAFRPKIGSSPHTNRNNEVSSDLPLVGKHNKGCHCKKSGCLKKYCECFQANILCSENCKCMDCKNFEGSEERRNLFQGDHKNAINIQQATNAAVNGAIGTTGFPSPSTSRKRKHIDPSLDHSNKEHAAHRNCHIPQSIYQKNAVPDGSIPISQSAHPPTLGPFKVTYRPLLADIVQAEDVKELCKLLVVVSGEAAKTYADRKAKEERVGKKEDERAEQKEDDRAGSLALTNHDREGNNQDPDKKASIDDHSSRGTHTGKANQEESRPNCADDQKSNRPMSPGTLALMCDEQAFEKMCDEQDTVFTASQNAVPQQTVTVNQNQSALYAEQERIVLTEFRDCLRKLVTYGRMKEERYAMEIKSETSGHPGQVNGVSQVPYSKVEVPVVKTDPQSSSSHPVAGKPVTGLLDKN

SEQ ID NO: 367087 - protein, 63 aa, Zea mays
  Clone ID: MRT4577_97953C.1.pep
LRTRGNFWKEKNHLGGNFGNGGHLYKGLKKRGGGFLPWKRPRGGPFGTKGLPSFFNKLGAGLF

SEQ ID NO: 367088 - protein, 134 aa, Zea mays
  Clone ID: MRT4577_97954C.1.pep
MQGVEWSEAAAADMAACWSKIFESVENGQGQHAPRPNAEDVAAAAAGLPMEWWWLCGDDAGVGEQAGSVTGGKPSPDVLGRRVHVDDGDGDYSCCYDHEGGRRSNDDGDEVTLPCMDDIGDNTQGWDGEWFSCP

SEQ ID NO: 367089 - protein, 75 aa, Zea mays
  Clone ID: MRT4577_97955C.1.pep
MDSTATGAGGKAKKEATMAQGSTGPPDKPLFTAEKAEVQIPAGRHRAVLVRRQKGVPRWSRWESLPRHWRRTHRS

SEQ ID NO: 367090 - protein, 139 aa, Zea mays
  Clone ID: MRT4577_97956C.1.pep
MEAAWRKAKRALGSSLCVHHPAVAGDREDGASERRASDALSLDTTAAAHASTPNAPAPPEAGALRRSKSGGKSTNRMCAICFDSMKPGRGQALFTAECSHMFHFHCISSSVKHGNHVCPVCRAKWKEIPFNRSLSSIVP

SEQ ID NO: 367091 - protein, 158 aa, Zea mays
  unsure (1)..(158): unsure at all Xaa locations
  Clone ID: MRT4577_97957C.1.pep
MGQELGLEELPEDIIHRIHSIMPIQDAARAACVSRRFLHYWRSYSSLILSDRTLGLDDTDFEERKTHLIDKVDRILKNHYGNGVKVKTLKLELGLCSDIKASYLDRWLRITKSGIQEFSLVLPLVMNKIYXFPCSVLSNEAAASSIQSLSLFGCAFHP

SEQ ID NO: 367092 - protein, 174 aa, Zea mays
  Clone ID: MRT4577_97958C.1.pep
RFTSSSSEKVLGSSSKLTTASATVRNISLKVESQVKLPDTSVKKIAGEKLSRDAFKSGKSYPQSMPSYSARSRRGSLEPISEIEKHTFKKDRELLENKFDRLKSTDVVKKTTAHLEKEKQITAPWKSMDAWKEKRNWEDILKSPVRSSRVSHSPGVGRKVTDRARVLHDKLMFS

SEQ ID NO: 367093 - protein, 123 aa, Zea mays
  unsure (1)..(123): unsure at all Xaa locations
  Clone ID: MRT4577_97959C.1.pep
MAAVLNSRKTPQAAVTVLVATALLDSSASAAITCGQVGSSLAPRIPHATGRVSALPXSSCCAVVNSLNSAERTSADRQXAGRCVKSLANSVNSANMVTSLSPSPCRAAASPSFPISMSTDCSK

SEQ ID NO: 367094 - protein, 132 aa, Zea mays
  Clone ID: MRT4577_9795C.1.pep
DARAGIDLRVSCSHIVVQMRYSPGCQSWSSMGCRSYGLIATKKTFQRSVPNWSQYSRMGIVSFVSRSGNRELCTQPEESEEHMAAEVRSHRACTARGSRRGMFCMFLQTSRFSRSSGKVRGRQRNVRSIPAG

SEQ ID NO: 367095 - protein, 139 aa, Zea mays
  unsure (1)..(139): unsure at all Xaa locations
  Clone ID: MRT4577_97960C.1.pep
VFAKGEPGIAAVYDKLLVADDLQSFGEQLRKNYEETKELLLQVAGHKDVLEGDPYLKQRLRLRESYIAALNVCQAYALKRIRDPSFQVSPQPPLSKEFTXESQPAELVQLNQQSEYAPGLEGTLILTMKGVGXGMQNTG

SEQ ID NO: 367096 - protein, 150 aa, Zea mays
  Clone ID: MRT4577_97961C.1.pep
PCAPKDPRVFGDPPGGFVADRFLGEEGSKLLQYVYWFNGRETENPRVGNKQCPGKKFVVLVGRVLLVEVFLRFDTFPPQVGKEMFGPRVIFSGVPKTTSGPGNELTPRPGRVVGNIMSGRDKGSPYFLNLSFSPFLLIKIFFSPRAPLYV

SEQ ID NO: 367097 - protein, 193 aa, Zea mays
  unsure (1)..(193): unsure at all Xaa locations
  Clone ID: MRT4577_97962C.1.pep
HKTDACLLIDGESLSLMLSQFGPAFITVQVTLPAVVACXCSPTQTAEVAELIRQHTKKRVCCIGDGGNDVSMIQAADVGIGIVAKEGRQASLAADFSITQFHHITKLLVWHGRNSYKRSAKLGQFIMHRGLIISACQTMYSIASHFDPKGLFINWLMVGYATVYTNAPVFSLVLPKDVDEELDNXYPELYKEL

SEQ ID NO: 367098 - protein, 960 aa, Zea mays
  Clone ID: MRT4577_97963C.1.pep
MPERHQSIDAQLRLLAPGKVSEDDKLVEYDALLVDRFLDILQDLHGPHLREFVQECYELSAEYENDRDEARLGELGSKLTSLPPGDSIVVASSFSHMLNLANLAEEVQIAHRRRIKLKRGDFADEASAPTESDIEETLKRLVSQLGKSREEVFDALKSQTVDLVFTAHPTQSVRRSLLQKHGRIRNCLRQLYAKDITADDKQELDEALQREIQAAFRTDEIRRTPPTPQDEMRAGMSYFHETIWKGVPKFLRRIDTALKNIGINERLPYNAPLIQFSSWMGGDRDGNPRVTPEVTRDVCLLARMMAANLYFSQIEDLMFELSMWRCSDELRIRAHELHRSSKKAAKHYIEFWKQVPPNEPYRVILGDVRDKLYYTRERSRHLLTSGISEIPEEATFTNVEQFLEPLELCYRSLCACGDKPIADGSLLDFLRQVSTFGLALVKLDIRQESDRHTDVLDSITTHLGIGSYAEWSEEKRQDWLLSELRGKRPLFGSDLPQTEETADVLGTFHVLAELPADCFGAYIISMATAPSDVLAVELLQRECHVKQPLRVVPLFEKLADLEAAPAAVARLFSIDWYMNRINGKQEVMIGYSDSGKDAGRLSAAWQMYKAQEELIKVAKHYGVKLTMFHGRGGTVGRGGGPTHLAILSQPPDTIHGSLRVTVQGEVIEHSFGEEHLCFRTLQRYTAATLEHGMHPPISPKPEWRALMDEMAVVATKEYRSIVFQEPRFVEYFRSATPETEYGRMNIGSRPSKRKPSGGIESLRAIPWIFAWTQTRFHLPVWLGFGAAIKHIMQKDIRNIHILKEMYNEWPFFRVTLDLLEMVFAKGDPGIAAVYDKLLVADDLQSFGEQLRKNYEETKELLLQVAGHKDVLEGDPYLKQRLRLRESYITTLNVCQAYTLKRIRDPSFQVSPQPPLSKEFTDESQPAELVQLNEQSEYAPGLEDTLILTMKGIAAGMQNTG

SEQ ID NO: 367099 - protein, 960 aa, Zea mays
  Clone ID: MRT4577_97964C.1.pep
MPERHQSIDAQLRLLAPGKVSEDDKLVEYDALLVDRFLDILQDLHGPHLREFVQECYELSAEYENDRDEARLGELGSKLTSLPPGDSIVVASSFSHMLNLANLAEEVQIAHRRRIKLKRGDFADEASAPTESDIEETLKRLVSQLGKSREEVFDALKNQTVDLVFTAHPTQSVRRSLLQKHGRIRNCLRQLYAKDITADDKQELDEALQREIQAAFRTDEIRRTPPTPQDEMRAGMSYFHETIWKGVPKFLRRIDTALKNIGINERLPYNAPLIQFSSWMGGDRDGNPRVTPEVTRDVCLLARMMAANLYFSQIEDLMFELSMWRCSDELRIRADELHRSSRKAAKHYIEFWKQVPPNEPYRVILGDVRDKLYYTRERSRHLLTSGISEILEEATFTNVEQFLEPLELCYRSLCACGDKPIADGSLLDFLRQVSTFGLALVKLDIRQESDRHTDVLDSITTHLGIGSYAEWSEEKRQDWLLSELRGKRPLFGSDLPQTEETADVLGTFHVLAELPADCFGAYIISMATAPSDVLAVELLQRECHVKHPLRVVPLFEKLADLEAAPAAVARLFSIDWYMDRINGKQEVMIGYSDSGKDAGRLSAAWQMYKAQEELIKVAKHYGVKLTMFHGRGGTVGRGGGPTHLAILSQPPDTIHGSLRVTVQGEVIEHSFGEELLCFRTLQRYTAATLEHGMHPPISPKPEWRALMDEMAVVATKEYRSIVFQEPRFVEYFRSATPETEYGRMNIGSRPSKRKPSGGIESLRAIPWIFAWTQTRFHLPVWLGFGAAIKHIMQKDIRNIHILREMYNEWPFFRVTLDLLEMVFAKGDPGIAAVYDKLLVADDLQSFGEQLRKNYEETKELLLQVAGHKDVLEGDPYLKQRLRLRESYITTLNVCQAYTLKRIRDPSFQVSPQPPLSKEFTDESQPAELVQLNQQSEYAPGLEDTLILTMKGIAAGMQNTG

SEQ ID NO: 367100 - protein, 161 aa, Zea mays
  unsure (1)..(161): unsure at all Xaa locations
  Clone ID: MRT4577_97965C.1.pep
MGGRAKTXKTGALVRGGPGKLPRPRSDETDYGGRIRLINHDKTXHIHSEYRLAVRVTTEVITGHIICARIAXDMALAYAFSVEVSRXYGLEAVMTNYADAYCTVLLLPGRELKTRGEDIVYDGNVDDAGEDFSXGPADERRSSRALWDGGLIRTXTAGNRW

SEQ ID NO: 367101 - protein, 299 aa, Zea mays
  Clone ID: MRT4577_97966C.1.pep
MLVWAATASPPSTPSAVPFAPPHRAAAPRPPPPLCRSLPGLLCAGLIPPPRAAASDGDVFWEEPDDGSGSDYEDDGPEQRRALRFPSSSPSSRLEASAQQEQDLRREIELLLTPEEKATLDQHETPDVTRISSPKWHPLHSYALALQIPLMDKLLDSGVDINLVDRDGFTSLHKAVIGKKEAVISHLLRKGANPHVRDRDGATPLHYAVQAGALQTVKLLIKYKVDVNVADNDGWTPLHLAIQSRNRDIAKVLLVNGADKTRRTKDGRTALDLSLCFGRDFKSYDLAKLVKLIPANRGA

SEQ ID NO: 367102 - protein, 102 aa, Zea mays
  Clone ID: MRT4577_97967C.1.pep
GRDFYASLLQKCLTTMNGGSLCTARNYHTTRSGRAMQHMHSRPPPAVREHHAYRRIRGRRSGFEDSAASEVYKELQVRVLRRGPFQQQHASRQCRCAHQKDE

SEQ ID NO: 367103 - protein, 180 aa, Zea mays
  Clone ID: MRT4577_97968C.1.pep
MDKLLNSGVDVNLVDRVSYVLMIFILLLYQNNPICEGIVNYISVADRDGFTSLHKAVIGKKEAVISHLLRKGANPHVRDRDGATPLHYAVQAGALQTVKLLIKYKVDVNVADNDGWTPLHLAIQSRNRDIAKVLLVNGADKTRRTKDGRTALDLSLCFGRDFKSYDLAKLVKLIPANRGA

SEQ ID NO: 367104 - protein, 65 aa, Zea mays
  Clone ID: MRT4577_97969C.1.pep
FCPIFPHLILITADCFFRPLHHDLRVTPLYNHCWVSFCYPIPQNKARHKGTLVCFPPLGPIMCSP

SEQ ID NO: 367105 - protein, 131 aa, Zea mays
  Clone ID: MRT4577_9796C.1.pep
GMVHVHIVDARFGPHRIGMLRHAARGSPRHGVEPRGRWTWTRTGRRRPGQQRLQLLRTIASSHPRLAPVPPWAFVAVFISHACEQSEKQSRPCLPRIGRSEPRSHAGLYSRRCLACTPASGRRSVPSSRDA

SEQ ID NO: 367106 - protein, 203 aa, Zea mays
  Clone ID: MRT4577_97970C.1.pep
AQVAPELVVYSELLSTKRLYMHGVTTVKPGWLLKYASSLCTFSAPLEDPKPYYDPLNDQVYCYVSPVFSRHNWQLPLHSLPIKDGASRLQVFACALLKGDVLPCLRDAKDFLALSPSAVLGPARQRRVGDLLSRMKIGPKLVDSRAALRGVWNLDPGFLYPELKLWYQDRFHDQFDLVWEQMHQQVLLEGRKLFPKRSKKVKG

SEQ ID NO: 367107 - protein, 97 aa, Zea mays
  Clone ID: MRT4577_97971C.1.pep
QAFFFFFFFFFFFFFWNMSDQQQRGDDSQINKSLQGYMTQLPTAPTEKPATFYFHKGNINTRNAYKGRACKPKRRGTWGRAWCPQKPGAWRARRGTP

SEQ ID NO: 367108 - protein, 125 aa, Zea mays
  unsure (1)..(125): unsure at all Xaa locations
  Clone ID: MRT4577_97972C.1.pep
MRVTLVALALLALAASATYTHTSSRSSCQPPSPAHVXTSLHLPAPIHLPPTVHLPPPVHLPPTVHLPTTVHVPPPVHLPPTPCHYPTQPPQTQXPHSQPHSCPCQQPDSDPCQLHGTCRVGNTPI

SEQ ID NO: 367109 - protein, 82 aa, Zea mays
  Clone ID: MRT4577_97973C.1.pep
RPGSLLCQVLWNQQCLALSTIFLPIMDPMSQMRKPTTWTRPSLSHDWSNNVPALFCVLTCLDCSDVATCISLLLQLYPPWMS

SEQ ID NO: 367110 - protein, 132 aa, Zea mays
  unsure (1)..(132): unsure at all Xaa locations
  Clone ID: MRT4577_97974C.1.pep
DPPVRRTNSVKHLLLPNITHLPLATLYPYCQQQQFLPFNQLPTLHTAAYLQQQLLPFIQLATAYSQQQLLIPFDYSAELNPAAYLQQQILLPFIQLPATNRAYFLTHQQLHAFLPXFAANPATLLHLLQLLP

SEQ ID NO: 367111 - protein, 160 aa, Zea mays
  unsure (1)..(160): unsure at all Xaa locations
  Clone ID: MRT4577_97975C.1.pep
RQVHYKTYSDAATTPPWHVPAAFYMPSTVYMPPXEQSHPXEYPTQPPQFYPXHQLRSCAIGWAXNPTLGQIVXYLRHKHNTLGTPYCLAQYQSHHQHCXHQIRQVEHVIRSQSIYXLGLLCFLKEXPLCKLAMLMKATVTHLLTTMLSLHLHQPYPCPCN

SEQ ID NO: 367112 - protein, 148 aa, Zea mays
  Clone ID: MRT4577_97976C.1.pep
VDDDYFRRLTFVASSPVPIKIMAGPIFKFGTPPKGILSPGGKKKGPPEKNPPKKSVFGGVSPSPNFFFTKKKGGPPPPEEKKKKNFFFWGGPPPFFFFWWGANPPPRGGGGGKKLFFFFFFPPPPRIIFSPPPPAGGGVFFFFFPPPP

SEQ ID NO: 367113 - protein, 260 aa, Zea mays
  Clone ID: MRT4577_97977C.1.pep
MASTSCCLLHQSTARLGASPRLAAAPPRSAQLLVCKARKQEAAADQSDVSRRAALALLAGVTAAAGAKVGPAAAAYGEAANVFGKPKASTEYIAYSGDGFKLLIPSKWNPSKEREFPGQVLRYEDNFDANSNVSVIIQPTSKKTIADYGSPEEFLSQVDYLLGRQAYGGKTDSEGGFETGAVATANVLESSTPVIDGKQYYAVSVLTRTADGDEGGKHQLIAATVSDGKLYICKAQAGDKRWFKGARKGVEKAASSFSVA

SEQ ID NO: 367114 - protein, 52 aa, Zea mays
  Clone ID: MRT4577_97978C.1.pep
IIHIMWNLHHRRGGKKRKKERGKRQELSHLAREHHRVSSRRRTSGVECRSFL

SEQ ID NO: 367115 - protein, 260 aa, Zea mays; identical to SEQ ID NO: 367113
  Clone ID: MRT4577_97979C.1.pep

SEQ ID NO: 367116 - protein, 132 aa, Zea mays
  Clone ID: MRT4577_9797C.1.pep
MASIAGSAVSFAKPVKAINTNSLSFSGARRGNAFLRLQPVPMRFAVCCSAKQDTVEKVCEIVKKQLAVPEGTEVCGTTKFSDLGADSLDTVEIVMGLEEEFQISVEETSAQAIATVEDAATLIDKLVSAKSS

SEQ ID NO: 367117 - protein, 113 aa, Zea mays
  Clone ID: MRT4577_97980C.1.pep
MSRKRREGGGGGRGAGPVDHHGGGKGSEAGAAATDAVSMDGGLREVSVPVVFSVWCLLFLLRSQFLHSQADDDPSSEFYEEHGMRDSYCKVRPLEAYVLPYHNDSCQSSYSHS

SEQ ID NO: 367118 - protein, 60 aa, Zea mays
  Clone ID: MRT4577_97981C.1.pep
LSRTELITCMITRILVPSDADVRSGRWWANCLHTCSKIGSKAQQKNGLAGLIALATYEIH

SEQ ID NO: 367119 - protein, 92 aa, Zea mays
  Clone ID: MRT4577_97982C.1.pep
KHDQMVTYVMAHTVKSQHFPHGLSSSRRGKKTSTKEASTAGTGTKAERNHEAHTRDHQRNTRWGNSLARPWRYLAVEMVMRNRGAQELQGTR

SEQ ID NO: 367120 - protein, 145 aa, Zea mays
  unsure (1)..(145): unsure at all Xaa locations
  Clone ID: MRT4577_97983C.1.pep
QWVSXGSTXKPGTGRRGFPSTPVSLKXRLLKAFIYLPXKWFLCTGAILTRQAXXMPCSTRTPHASQRRGFPTCDNRAWXXMWIRKSHLPSMGVCLYRDRKRPRRPEGNMGERGQRFDLAXGRRSPPHAYSSAMLDFFFFFFFFFF

SEQ ID NO: 367121 - protein, 86 aa, Zea mays
  unsure (1)..(86): unsure at all Xaa locations
  Clone ID: MRT4577_97984C.1.pep
SLNDQGNFLTDDQILPLLLGICRGLEAIHAKGYAHMVLKPTNILLGDEGQPVLMDLGSMHQAXFPVEGSRHALALQDWAAQRCTIS

SEQ ID NO: 367122 - protein, 83 aa, Zea mays
  Clone ID: MRT4577_97985C.1.pep
ELASRSVGHGGGLLVSRHGCCTMVGYVGEVRARPVLWFARQARSRQRPSEKFSKGSLHCNHNYCSPKYLTLLILNADPLLFTT

SEQ ID NO: 367123 - protein, 80 aa, Zea mays
  Clone ID: MRT4577_97986C.1.pep
SHNNINDILIVFGDLHQYGLPPLHLIVCAPFYVSHVSVFFAHQNIEPFIVYSYGLITQMRVDWCMKMVELCIEDDVVEPV

SEQ ID NO: 367124 - protein, 49 aa, Zea mays
  Clone ID: MRT4577_97987C.1.pep
KGILWGSCTLLCVAAPSQLRCCIECGPGPIATNSKSMECVCHQAAFGYC

SEQ ID NO: 367125 - protein, 50 aa, Zea mays
  Clone ID: MRT4577_97988C.1.pep
PPSDDMSDDLPSSVICHGDDAWYESELARGNNPTLRVGAGRGGRRRGREY

SEQ ID NO: 367126 - protein, 66 aa, Zea mays
  Clone ID: MRT4577_97989C.1.pep
MRASAVASEYRFMRTTSSSGFANMILKLPMVSHEHVCLGGHVDGYLEQYRPAHMAHKKTRREEPDS

SEQ ID NO: 367127 - protein, 110 aa, Zea mays
  Clone ID: MRT4577_9798C.1.pep
PVATLASLQCHHGPPSQCSSPTRASSRKNSRGLLSHASGGRSLARTRASTVVVAFHVRGHRRRRCLACTPAPGRRSVPSSQDAQCVWETRPTGANYRLATLSSRAASLHQ

SEQ ID NO: 367128 - protein, 61 aa, Zea mays
  unsure (1)..(61): unsure at all Xaa locations
  Clone ID: MRT4577_97990C.1.pep
ASIFPTSSYFVSQYDIRILICKDPKEGNCWMQFGKDYLLAYWPSFLLXYLADSASTVEWGG

SEQ ID NO: 367129 - protein, 94 aa, Zea mays
  Clone ID: MRT4577_97991C.1.pep
LAGFLSGCGRSLSACASVAGWCLCCSAPLSWCFRVQSWLVPRWCGCLVCRPLGVLGGRVRGGCPPCLVQTPLGCLGAVGVINRGGLCLEPNSCA

SEQ ID NO: 367130 - protein, 111 aa, Zea mays
  Clone ID: MRT4577_97992C.1.pep
NIHILYKSCCTHGDRYTGISMIISLMHYPEAIGNEFGTPSRITIPHFQEIRTQNCSHMNRNSLMPYYAYPEAYGNAIGISRRIPIPHFQQLRRHTWSYMNCSYMFSYNSYP

SEQ ID NO: 367131 - protein, 50 aa, Zea mays
  Clone ID: MRT4577_97993C.1.pep
FNIWCAADYAFSDAGVIDSAVTVDYAFLMPNASTIGIPDSCCFEALSIYT

SEQ ID NO: 367132 - protein, 91 aa, Zea mays
  Clone ID: MRT4577_97994C.1.pep
VVVGLVAVVVVASVVVTHVVGLAGGRVYGDFIALLLLAVRVVHGSDAARVVVPGAGHALGLGGALRHRRRRRLRDGLRRGVGRPRLEQRAY

SEQ ID NO: 367133 - protein, 73 aa, Zea mays
  unsure (1)..(73): unsure at all Xaa locations
  Clone ID: MRT4577_97995C.1.pep
HXTLIPYIFYYSLTSFLANNHIXQTTPQNTSVSKKNSTLSTHSIRFRTITKLLPXPSIIKATAXLSPILTHHV

SEQ ID NO: 367134 - protein, 386 aa, Zea mays
  Clone ID: MRT4577_97996C.1.pep
MDGNFLQNALSKTRQVDDFTSRLLEIHRKMMEINKEENIRLGLHRSDYMLDSETSSLLQIELNTISASFPGLGSLVSDLHRSLIKQYGTSLSLEHKRVPANAASTQFSEALAQAWSEFNIDSAVIMMIVQPEERNMYDQYWLSKHLQDSHGITTIRKTLSQVEAEGQVLPDGTLLVGGQKVAVVYFRAGYAPNDYPSEAEWSARLMMEQSSAVKCPSISYHLVGTKKIQQELAKPNVLERFLKSEEIDKVRKCFAGLWSLDDEYIIKTAVEKPELFVLKPQREGGGNNIYGLDLRETLVRLQKEGGDALAAYILMQRIFPKASPAYLVRGGVCHEGLAISELGIYGAYLRNKDKVVINEQCGYLMRTKVSSSDEGGVAARFAHLDC

SEQ ID NO: 367135 - protein, 146 aa, Zea mays
  unsure (1)..(146): unsure at all Xaa locations
  Clone ID: MRT4577_97998C.1.pep
MTGSQSFAGLWSLDDEYIIKTXXVEKPELFVLKPQREGGGNNIYGLDLRETLVRLQKEGGDALAAYILMQRIFPKASPAYLVRGGVCHEGLAISELGIYGAYLRNKDKVVINEQCGYLMRTKVSSSDEGGVAAGFAVLDSLYLTGK

SEQ ID NO: 367136 - protein, 68 aa, Zea mays
  Clone ID: MRT4577_97999C.1.pep
VYPESILQLLHLQSVKSSVTSRFIVLTLALSPLMCAWWLLPIASSIRWRPLWPAQVCPGLLAQFLVIL

SEQ ID NO: 367137 - protein, 90 aa, Zea mays
  unsure (1)..(90): unsure at all Xaa locations
  Clone ID: MRT4577_9799C.1.pep
ATRAGEMVANYRTGLGRTDGMPCNTYNAEIGLGHAEGQFTKRNLTSVKPYATMLRHHGPVTXAVAFDXRGGNHTVPAGVDRKIKILDLRT

SEQ ID NO: 367138 - protein, 119 aa, Zea mays
  unsure (1)..(119): unsure at all Xaa locations
  Clone ID: MRT4577_979C.1.pep
SLTLACYICCLGMLIELSASAATATIFLQRSQAPITLINAPYLSPTLVXICENPLLEPYMIHHAHADSILLLPPLFIQQSSALLQQPLLYHLLEQYIKAQHLQRLLLAKRADDSHQQLS

SEQ ID NO: 367139 - protein, 126 aa, Zea mays
  Clone ID: MRT4577_97C.1.pep
MGSVDGRGVEGIHEANRRAQLIGWMNALLPEFSLPPDSSSEELRELLSDGVVLCRLVNTLIPGVLEGSWEGYAPSDQRLGNVKKFLSVVSDMGLPGFSLKDLDEGLISVEFLRGMWIDDITRCYQN

SEQ ID NO: 367140 - protein, 92 aa, Zea mays
  Clone ID: MRT4577_98000C.1.pep
KRKGSQSGNKTNFKKPKPTQSEQLKEKKLIVVLDRAFLETVYTKEKYELLNCDDHQRIIKKNYRDISDVRPDILHQCLLMLMDSPLNKAGYL

SEQ ID NO: 367141 - protein, 178 aa, Zea mays
  Clone ID: MRT4577_98001C.1.pep
MSREQQMPRRRFIAIPFSSGCRSHSSVDVVDTGRHAGNGKKPHPQGAEAGAAAARGKGESLVARLLRGFKNLSQIFAVYDDEDEEEEEREMVIGLPTDVKHVAHIGWDGATSTSSNLRSWNRPAPPPPASSFSAPQQRPQEQYPLPLPALSMRQLELAMGAQAQAAGGATTAAHRRHS

SEQ ID NO: 367142 - protein, 111 aa, Zea mays
  Clone ID: MRT4577_98002C.1.pep
MPAPPAAPPVPPAAPWRRHAPTAASSTPRTVLLLLPILLLLLFVLSKATDLTFSTTTTSSSSSRHVPVNLRSFDCYASPQASPMVANLVEGVPYPFFYSLADMGTLPDHPH

SEQ ID NO: 367143 - protein, 82 aa, Zea mays
  Clone ID: MRT4577_98003C.1.pep
LPTDVKHVAHIGWDGATSTSSNLRSWNRPAPPPPASSFPAPQQHPQEQYPLPLPALSMRQVELAMGAQAAGGATTAAPRVRS

SEQ ID NO: 367144 - protein, 115 aa, Zea mays
  Clone ID: MRT4577_98004C.1.pep
GVGALVKFPPEGAPKASPTLRVGICGDPGGEPLSGPFFPKAGLDTVSSPPFRVPIVRLAPARGFVWGSPLVGTRIPCCWGMGGSPGLFPAPAMGPFLAPGLKKAPIPSPFFFPGR

SEQ ID NO: 367145 - protein, 511 aa, Zea mays
  Clone ID: MRT4577_98005C.1.pep
MMATEPLSPGNLVEDVETLPLDSSSTLAATTDPLLRPPPPSSTFSPTAGENHGAFLDEEDEDVVDDFTPPLAPHAATAATKSREASPWFAEITVSEPRKHAEPATGAVGVIPGSASYVSYLIATQVPDGGEFRVRRRFRDVVALADRLAETHRGLFVPARPDKSIVEGQVMQRHDFVNQRCVTLQRYLRRLAAHPVVGRNPILHAFLTEPSGIPTSDGESPRWSPAMSAATSMAASAPVTPTKSGRDFFGVFKGLKQTVTNGWVAVRPPLVEEEIDTKYLVHKAKLEDLEKHLVTASQQAEAFVKAFDDLRSTTGLLGMSFIKLAMFEKEQAACSSQKRRAADISNFASAVIRVSRSQTKLNTEIVKHLGIIHEYMETMASVHNAFTDRSNALLRVQNLSADLYFLHTRAGKLESVSARGMDQERSRYQKIEELKETVRATEDAKTRALKELELIKENNMNEIKRFNKERRQDLVEMLKGFVLDQATYSDHFATIWTKVAEETKGYANSSS

SEQ ID NO: 367146 - protein, 122 aa, Zea mays
  Clone ID: MRT4577_98006C.1.pep
IRLEARPPVCLLRESSARYAKGRTCAERLRDVSMEGHARLFLYVGHLPGGHCGQTLNHTPDLGLRALSIEQRKGVWSDPAGHSDSGDRSTRHRNGDYRRPGAVTKARDELTEDDNTMLDRNI

SEQ ID NO: 367147 - protein, 136 aa, Zea mays
  unsure (1)..(136): unsure at all Xaa locations
  Clone ID: MRT4577_98007C.1.pep
SAPRICILVGVPSLGYVSEGRLRVGSVVSTSDRADLRYIIGNSSPVRALHRRSCHTVGRLNYLSISDEQVTEDPGVQQVEIDEQELIEGEGWIHGTRQDRPRALTGWRPVRPPSLTRNKTEDQSKSXRPPTLTTKR

SEQ ID NO: 367148 - protein, 78 aa, Zea mays
  Clone ID: MRT4577_98008C.1.pep
LGYLWFFWGGNQIIFERKTRGLPQHLAQKATKFYLILGQTPKTGHLQTLDLHLTYTGETDGSYGDTLGFINGPHFELF

SEQ ID NO: 367149 - protein, 79 aa, Zea mays
  Clone ID: MRT4577_98009C.1.pep
PNLLVIRENQAKEDAVHDVFKSIEPTALLPRLHSRCLAIIIGAPRRGDPAGSRSRSQFAEQNNGIRGRGSCKKFPEIRR

SEQ ID NO: 367150 - protein, 52 aa, Zea mays
  Clone ID: MRT4577_9800C.1.pep
QGHRAYPVDDDQNKCGVQVNQEFCNHREVLVQSFLSQVNVGPNCSFGFGAIG

SEQ ID NO: 367151 - protein, 315 aa, Zea mays
  unsure (1)..(315): unsure at all Xaa locations
  Clone ID: MRT4577_98010C.1.pep
MDRNNELEEVVPNDSDPLIGRENRESESSXRAVTATASNCEXLLEIEDEETDGSSAACCRICLEAESEIGDELISPCMCKGTQQFVHRSCLDHWRSVKEGFAFSHCTTCKAQFHLRVETWEDNSWRKMKFRIFVARDVLLVFLAVQLTIAIIGAIAYFLDRDGSFRNSFSDGWDRFLSKHPIPFYYCIGVVIFFVLLGFFGLIVHCSSFNDNQDPCLAGCRNCCYGWGILDCLPASLEACFALVLVFVVVFAILGIAYGFLAATMAVQRIWQRHYHILTKRELTKEYVVEDLHGNYTAPKLDPEHEERLKMLKLL

SEQ ID NO: 367152 - protein, 37 aa, Zea mays
  Clone ID: MRT4577_98011C.1.pep
CYIYMKPFFNRPLKNKSLVLETVGEDRNYDLTTTVQN

SEQ ID NO: 367153 - protein, 83 aa, Zea mays
  Clone ID: MRT4577_98012C.1.pep
PSVVLCPLGSADHLLRKVTHPTAVLPSQSFALLLGYKERIIRQERAICEVIGAIKPETEDQVGRESPGNYMRLGMFVLLIDYR

SEQ ID NO: 367154 - protein, 75 aa, Zea mays
  unsure (1)..(75): unsure at all Xaa locations
  Clone ID: MRT4577_98013C.1.pep
IEEPVQGAVSWVDTNQLXGVXEFAPKMKQLEGICTPIIARMSQAKGARMAAPRMRMDQNAPSGGIGPGPKIQEVD

SEQ ID NO: 367155 - protein, 68 aa, Zea mays
  Clone ID: MRT4577_98014C.1.pep
CHYYRTGNTYPDTVALPEGLKQKPPTFHRFELGDPALSNGRHVLKTPKLTNCVYVFTGLLFLRGHALT

SEQ ID NO: 367156 - protein, 93 aa, Zea mays
  Clone ID: MRT4577_98015C.1.pep
KDLGMGGDVPLTLVLRRGLPNPGRRQEPHVSRLLWLPWNHLCCFIQGGGHTAMQHRDRTLVGSATPRVLNHCAISASTNTTVIAYMIKNVEIT

SEQ ID NO: 367157 - protein, 166 aa, Zea mays
  unsure (1)..(166): unsure at all Xaa locations
  Clone ID: MRT4577_98016C.1.pep
LIEYEPEPAMLSYEPARAALTYKPATTPTAAAMFKLSRAELVRLRSQVPAREGAPGFNTYAGLAAHVRRSAALARGLPVDQPTKLDCATDGLQGLQPPVAEGYXRNGIFTATPLANAGTVTAVVSERASAIQAALDRMDYGYCARALDYLKLPPEISALLRGAHTL

SEQ ID NO: 367158 - protein, 376 aa, Zea mays
  unsure (1)..(376): unsure at all Xaa locations
  Clone ID: MRT4577_98017C.1.pep
VFLGPASFHQSVGPFSWRKPVPIGSNHQAELPECRPFGGRTEEDESVKWIRNSVVPMPGTDXVFGVGXVHCKAGCDCLDEGSINCVKKHVMEARENLKDSVGADAFRELGFYDMGEEVASRWSEEEERLFQQVVSSNRASLRRNFWDELPLAFPSKSSKELVSYYFNVFMLRKRAEQNRFDPANIDSDDDEWQAGGDFEFPITGRTDEYMPIESLTDQDDVACNPFPLEGDLYGDSDDEDELDNSSGGDRHNGVQRAGMLSEGHPEMSFIDHDQQTLKLDADAQDDSCTSFEAHQVGCDGGAHTDIGNHYRSDDGLCGGAEHGFFGDHCDTKEWGFGFSTGWERHDFLSTNNVIEEVFGKGSSEDGSDTATGQDLI

SEQ ID NO: 367159 - protein, 234 aa, Zea mays
  unsure (1)..(234): unsure at all Xaa locations
  Clone ID: MRT4577_98018C.1.pep
MASTDYSTYSQAAAQQGYSAYTAQPTQGYAQTTQAYGQQSYGTYGQPTDVSYTQAQTTATYGQTAYATSYGQPPTGYSTPTAPQAYSQPVQGYGTGTYDSTTATVTTTQASYAAQTAYGTQPAYPTYGQQPTATAPTRPQDGNKPAETSQPQSSTGGYNQPSLGYGQSNYSYPQVPGSYPMQPVTAPPSYPPTSYSSSQPTXYDQSSYSQQNTYGQPSSYGQQSSYGQQSSYGQ

SEQ ID NO: 367160 - protein, 104 aa, Zea mays
  Clone ID: MRT4577_98019C.1.pep
MVAVNRPLVYVKALQGDMVTDAPSISLPPVLGAPFRPDVIRFTHKLMSCNKRQPYTVSRRARHHTSAESWGTSRAVSHIPRVRMCGTHRAGQGAFWNIVPGGRM

SEQ ID NO: 367161 - protein, 51 aa, Zea mays
  unsure (1)..(51): unsure at all Xaa locations
  Clone ID: MRT4577_9801C.1.pep
NSIKIKVVAPPKKKKNVXIKGSILTSMSPFQQMWKFKKEYHXFGPPIVSKK

SEQ ID NO: 367162 - protein, 74 aa, Zea mays
  Clone ID: MRT4577_98020C.1.pep
YSLLAFLQGVFVWTRLWPLITPLIVHYMIQNHNHKLKIIIISKHSFNVDLIILIWCHRNYVLLSPSQKTCIGLS

SEQ ID NO: 367163 - protein, 48 aa, Zea mays
  Clone ID: MRT4577_98021C.1.pep
KQSILLIKHNFTEEQGDVKLYTIQIYLIYNSSVEYRWSEYITILKVII

SEQ ID NO: 367164 - protein, 37 aa, Zea mays
  Clone ID: MRT4577_98022C.1.pep
KVIESAAPIGEPSPVARPRALAQPSAVRYVLSQQPID

SEQ ID NO: 367165 - protein, 74 aa, Zea mays
  unsure (1)..(74): unsure at all Xaa locations
  Clone ID: MRT4577_98023C.1.pep
RRLLLFRRLRXAAASFLHLPSXHRAAAATINGHPASSPTLAQEAPTDLLSTRTTXTHQTRATXLHRHXPXXLAP

SEQ ID NO: 367166 - protein, 74 aa, Zea mays
  Clone ID: MRT4577_98024C.1.pep
NLGQKKKKKKFFFSPAPGLIKNQNPGAPQIYFVSFNFGGRLHNNPCENSRGGKKNFDLFKGGKWDNIPNFFFRP

SEQ ID NO: 367167 - protein, 70 aa, Zea mays
  Clone ID: MRT4577_98025C.1.pep
LKHLYSYGGGPFKGSNFSSPCLQHYIFFIGPLKYNNLPVFLNLCNWKNPGVTKLNRFEKNSLFASWFNNK

SEQ ID NO: 367168 - protein, 150 aa, Zea mays
  unsure (1)..(150): unsure at all Xaa locations
  Clone ID: MRT4577_98026C.1.pep
MADSEEHQFLWKGDVEKYRIYPHEGVTDRNNGFLVIQKRACKXVAGLLPYKNGKRGLAKCQFVAVCIFPGKKLVNIVASSHHCDISHENRNDHHLIAISEDGILNRLSSYGNTKDGLKLPTDDTLCGPYXNRFARSKDILVNVQNAMGEG

SEQ ID NO: 367169 - protein, 47 aa, Zea mays
  Clone ID: MRT4577_98027C.1.pep
PKILGTMRTHTISRLQGCRRVLATNHPIPAGHRATEAEAVAESLMPP

SEQ ID NO: 367170 - protein, 99 aa, Zea mays
  Clone ID: MRT4577_98028C.1.pep
FCQLYRLQLMMGSRPYTQSCLHHGALTRPISVCLPGFLPSHAGFNTCNLCFPIPAGLWAACPRISTRHLQTYQLSLYRVLLKLARITFICGPCRTLLCG

SEQ ID NO: 367171 - protein, 45 aa, Zea mays
  unsure (1)..(45): unsure at all Xaa locations
  Clone ID: MRT4577_98029C.1.pep
RLDLERKXESLQEEIAFLKKLHEEEIQELQAQIQEQHVQIDVDVS

SEQ ID NO: 367172 - protein, 74 aa, Zea mays
  unsure (1)..(74): unsure at all Xaa locations
  Clone ID: MRT4577_9802C.1.pep
AGPTXTCLIARKQRMERGVSPVETVAVIATCQLWHMVYDQIGGVGQQYMTLVETEASVFTLFVHLRIHGFFVRF

SEQ ID NO: 367173 - protein, 85 aa, Zea mays
  Clone ID: MRT4577_98030C.1.pep
KKMVQYVLVFPSIPFKASCSLQTSIIKLIPGLFEQNANLGSTVNVTPSFVNLIPNSKLVPKCLFLGFCSFQIFNPYFLLYFKTSY

SEQ ID NO: 367174 - protein, 277 aa, Zea mays
  unsure (1)..(277): unsure at all Xaa locations
  Clone ID: MRT4577_98031C.1.pep
MAGCAAARMFAYNASLCACDPGYYYYLSSNGTASCVPMPGGGWGDWQVGSVGAPRNQSLYFLEPVLSVYAIRRLTQSQAVLLEATLASLLCWIAFCAAARFGGRDPRGEKRLFRARYWVSRLDCLFDNSHWAGDQQVLRKRKTELGGTFSVASLIIFTGLLTVLLYQAIKRRSLEMHRVKPANAPDLLSFVNDLEFHITTISSMSCTQAVAPLTVAMGTPGFMDFRVVPLSTLFTYSCTNTSHGPSITLRCNGCRVPSRDXYVSWQFVDLLGQPATA

SEQ ID NO: 367175 - protein, 70 aa, Zea mays
  unsure (1)..(70): unsure at all Xaa locations
  Clone ID: MRT4577_98032C.1.pep
ISNQNKSKSFIFLPKPSNPQVFEMIGQDLIWLERGREANFVHCKVSQIKYLFQKKKKKGGQQLVMQXXRE

SEQ ID NO: 367176 - protein, 83 aa, Zea mays
  Clone ID: MRT4577_98033C.1.pep
NNAGKRKVFLSLSRFPGDAKKRVKHLDPAQGRTLQTRVTQECHPKKKGGNLCCSRSRSGTHRTAMGSSAGKQHQDTQAGHHRT

SEQ ID NO: 367177 - protein, 412 aa, Zea mays
  Clone ID: MRT4577_98034C.1.pep
MASPTRTPSPPPAVEPIAPSLSSEHPPVNPSCDGSFSPENPAPPPPPPPATPHPHTPGDSSPSSIPHPSAPQLLPSPPPHTPDDSSPSSTPHPSAPQPPPSPPPPSADASPPLSRQGETSPPRPSPPPSPAPVSPPTPAPASSEAKSEQEEAESASESGSMTLAIVLAKTEDATPPKASSAEASPTRSPQKESAVTIAKLLSAEDLAAMEAKATPDKVTPPSDAGSLAAAAAVTTVGGVSGGVGSKRWLLGGVPEKVRRAELRRAELGFRVSAAVFCLVALSVMAADTTTGWSGDSFRRYNEYRYVLAASVVTFTYCGFQLVAEVHYVVTGRHMIRAPFRSYFNLAMDQMLAYLLLSASSAALSRNGVWMSRFGGDQFTKLINVSASMAFLAFIALGLNSVISAYCFFSLVS

SEQ ID NO: 367178 - protein, 216 aa, Zea mays
  unsure (1)..(216): unsure at all Xaa locations
  Clone ID: MRT4577_98035C.1.pep
MMASSLLFVVVLLAALSSPPPSAVXGGRRRXTHLHFFMHDVATGSNPTAVQVIKGAGSSVVPGLAFGDTTVIDDALTETSSPTSAAVGRAQGFYMMSSQSGIVLMVCANLLLTAGDHNGSTLAVVGRDDVAADVRELSVVGGTGRFRMATGYVLWKTSSMNGPDATVELDVHVRTATTAATGSGTTGAFSGAAAKRVGAGWVIACAVAVVGAVVGS

SEQ ID NO: 367179 - protein, 95 aa, Zea mays
  Clone ID: MRT4577_98036C.1.pep
PSTTSPDHREAVSAASPPLPLAGYHRMRNPRLPCRCPTCTSPAVGAGVPRDPVDRPSALPVELALEIYPDWDFFSVRMLSNFHLSVLWQAGVPFC

SEQ ID NO: 367180 - protein, 89 aa, Zea mays
  Clone ID: MRT4577_98037C.1.pep
IELPSVYSLRERATPQLAGVSFAFGGVNGPRPYENWLPFTQRGDEVLTCLYKRTGVWLNPPRGCCVRPQALERFSTPPKPALRRETHKT

SEQ ID NO: 367181 - protein, 149 aa, Zea mays
  Clone ID: MRT4577_98038C.1.pep
GRGTEILSKNSPAPPSPRVPCPRLRRGRRRRRGTYAPIPLLSLLCFAKCSCSRTLRAQGTGKGRKNMGEFDDYWARAYRGDSAVPHSDPQRLVSTWTGAFALGAAACVHHHASALASHLKSLPATWQDMTLALDQKRWKKAIEKKQQRA

SEQ ID NO: 367182 - protein, 49 aa, Zea mays
  Clone ID: MRT4577_98039C.1.pep
KGQVLTCLCFLLFATAHYYFLPLGPQLDEHVSGHQLWRMKFQSFLSLYT

SEQ ID NO: 367183 - protein, 151 aa, Zea mays
  unsure (1)..(151): unsure at all Xaa locations
  Clone ID: MRT4577_9803C.1.pep
KGDSTAPPKKMAAAPEELLCAAAKSGEDVEVAKLLASGADATHFDADGLTPLMHASXGGHAAVARLLLDCGAPWNALSPSGLSAGDLASDPDTYDLLLDHALRSELVLGTVARRQAAPANGPPAESYLESRVSFSEERVMDAEXKAVMMAW

SEQ ID NO: 367184 - protein, 132 aa, Zea mays
  unsure (1)..(132): unsure at all Xaa locations
  Clone ID: MRT4577_98040C.1.pep
PVRRSRRPGCMPRLRRGRRRRRGTYAPIPLLSLFCFAKCSCSRTLRAQGTGKGRKNMGEFDDYWARAYRGDSAVPHSDPQRLVSTWTGAFALGAAACVHHHASALASHLKSLPATWQDMTLALDQKRWKKAX

SEQ ID NO: 367185 - protein, 79 aa, Zea mays
  unsure (1)..(79): unsure at all Xaa locations
  Clone ID: MRT4577_98041C.1.pep
VIRPCKKMRSAHLNVITFGQYXMRPSKRHIPVSEYVTLXASHKYRAVGVKMGFRKDVSGPMVRCSYKADALYIQPMIEA

SEQ ID NO: 367186 - protein, 208 aa, Zea mays
  unsure (1)..(208): unsure at all Xaa locations
  Clone ID: MRT4577_98042C.1.pep
FGTRFHSSLPPCFSQAAEAIGASRERPAPPTPRQPWTPPRRXSSASSSPEFEFWPLYPNPAASPSCADELFAGGVLLPLPILPPKPESRNKGSGISQCVPVAEPEPESQLGEASLLATAAAPTASMTSQAPSTGSGGGGSKRWTDIFSKKPAPGGEEKDREKDKEKRKDGACSRKQGSGHTGGAGSELXINIWPFSRSRSGGAGPAHP

SEQ ID NO: 367187 - protein, 924 aa, Zea mays
  Clone ID: MRT4577_98043C.1.pep
MARVRSTTRVERKGGEAEGAETVPISEAMKRSGLMTSEDTPAAEAEQADIEEAGTDDDYNIAVPSKPSHLDFGKSTISKADFPKMVKSGYFSEDEKKMIRFGGEEITPKPQKDEIVIFKSFLKAGLRFPLNSMIVDVLKKFGIYFHQLTPNAIVRLSVYIWALRSQAVEPFAEGFCRVHELHYQTKARKDGLHENFGCYNFAYRKTTKFPVIRYRSKWPAGWKSEWFYVKVDDDKEKLVQSSLELIFGETRPQCRMTPDGPTQTALAEFRIIAEHIGTRDLVQEFLAFKVFPTMKEWAMPKLKGEKKEGELIQLPYHYKFKKYFKAPCQEWLETIEIMSFEYPDYGRLGRDAGGPKRKRIASTVDEESTKVAKKKKEISKKLSPEKLSPEPKVVAARKRKTASPEPKTLVQEEDTPATPSAAEVEEILKVMTEPLSVKLSPLAPELTKFFQKDKAASAEESPAPPKKRRIIQIADVIHQTPPPATVPKIAFAETAEAEGAAAEASRVETTEAEIGDAEAAGAEGGTTEGSNLESTLEVIDNILLKMAEQEAVVAAVTTTTGKEKEQIDDTLEGENFNFQDLFGQELTGAEKEELKKYAISCGYKPGATLFGGVNEGKLRCLRNRTEAKVVRTLSKSVGLPKLEADLCGYQRHHIAGSLLYANFKSILLSKVLKMQQDLEEEKTKTIIKDLEEKVEDYEAVLKKKDFTIQDLEIMTKEHEGALEKKDFVIQSMEASLAEIQAENNSLKDELLKQLEKSEQEKKHLEASLKTEMEKNSNLQKSLKELQEKCLSFGSRCVQRLKDVFHSIGASSEKITPSAENLPSTLEYIEGEVDALDEVIGGHADFCALVASRGTTTTFLKAGCTHGKIVNRPNFSLSSSDLIDIPSLARSIGNRFMTQIWVNGGRKMAGDEARSHLKLDDEAEV

SEQ ID NO: 367188 - protein, 827 aa, Zea mays
  unsure (1)..(827): unsure at all Xaa locations
  Clone ID: MRT4577_98044C.1.pep
MARVRSTARVEREGDEAEGVETVPISEAMQRSGLXEEVPAAEAEQGAAEAEQGDIEEADSDDXVKSGYFSEDEKKLIRFSGEETTPKPEKDEIVIFKSFLKASLRFPLNRMIADVLQKFGIYFHQLTPNAIVRLSVYIWALRSQAVEAFPEGFCRVHELHYQTKAREDGLHENFGCYNFAYRKTTKFPVISYRSKWPAGWKSEWFYVKVDDDKEKLEWTMPKLTGEKKKGELVRLPYHYKFKKYFKAPCQEWLDTIEIMSTEILGNYSKKEDQLMTAAFGTRPKRRLNRVLDVIGFEYPDYGRLGGDAGGPKRKRIASAVDEESTKVAKKKKEISEKLSPEKLSPEPKVAAARKRKTASPEPKTLVREEDTPATPSAADVEEIMKVMTEPLPVKLSPLAPELTKFFQKDEAASAEEGPALPKKRRIIQIADVIHQTPPPATMSKVAFVETAEAKGAAVEATRVEAPEAETGAAEATGAETGVTKDPNLEDTLEVIDNILLKMAEEETVVAAASTATEKGKKQVEDILEERDFNFQDLLGQELIDAEKEELKXYAISCGYKPGATLFXSILLSKVLKMQQDLEDEKNKAIIQDLAEKVENYEADLKKKDFTIQDLEIMVKEHEGALEKKDFVIQSVQGSLAEVQAENDSLKNELLKQSEKFEQEKKHLEASLKTEMDKNSNLQKSLKELQVKCLSFGSRCVQRLKDVFHSIRASSEKFTPSAENLPSILEYIEGKVDALDEVIGGHADFCALVASRGTATAFLKAGCTHGNIVNRPNFSLSASDLIDIPSLARSIGNRFMTQIWVSGGRKMAGDEARSHLKPDDEAEE

SEQ ID NO: 367189 - protein, 755 aa, Zea mays
  Clone ID: MRT4577_98045C.1.pep
MVKSGYFSEDEKKLIRFGGEETTPKPEKDEIVIFKSFLKAGLRFPLNRMIADVLQKFGIYFHQLTPNAIVRLSVYIWALRSQSVEPFAEGFCRVHELHYQTKARKDGLHENFGCYNFAYRKTTKFPVISYRSKWPAGWKSEWFYVKVDDDKEKLVQSPLELIFGETRPQCNMTPEGPTQKALAEFRIIAEHIGTRDLVQEFLAFRVFPTIKEWTMPKLTGEKKEGELVRLPYHYKFKKYFKAPCQEWLDTIEIMSTEILGNYSKKEDQLMTAAFGTWPKRRLNRVLDAIGFEYPDYGRLGGDAGGPKRKRIASAVVEESTKVAKKKKEISEKLSPEKLSPVPKVAAARKRKTASPEPKMLVREEDTPTTPSSADVKEIMKVMTEPLPVKLSPLALELTKFFQKDKAASAEEGPALRKKRRIIQIADVIHQTPPPAIVSKVAFVETAEAKDAAAEATRVETPETETGAAEATGAETGATEDLNLEDTLEVIDNILLKMAEEEAAMATTSTVIEKGKTNLLGQELTDAEKEELKKYAISCGYKPGATLFGGVNEGKLRCLRNRSEAKIVRTLSKNIGLPKLEADLCRYQRHHIAGSLLYANFKSILLSKVLKMQQDLEDEKNKAIIQGLAEKVENYEADLKKDFTIQDLEIMVKEHEEKFEQEKKHLEASLKTEMDKNSNLQKSLKELQGKCLSFGSRCVQRLKDVFHSVGASSAKFTPSAENLPSTLEYIEGEVDALDEVIGRHADFCALDDEAEE

SEQ ID NO: 367190 - protein, 502 aa, Zea mays
  Clone ID: MRT4577_98046C.1.pep
MTPEEAGGPKRKRIASAVVEESTRVTKKKKEISEKLSPEKLSPEPKVAAARKRKTVSPEPKTLVREEDTPATPSAAEVEEIMKVMTEPLPIKLSPLAPELTKFFQKGKAASAEESPALPKKRRIIQIADVIHQTPPPATVSKIAFAETAEAEGAAAEASRVETTEAKTGDAEATEAEVGTTEGSNLETTLEVIDNILLKMAEEEAAVAAVTTATGKGKEQIDDTLEEESFNFQDLLGQELTGAEKEELKKYAISCGYKPGATLFGGVNEGKLRCLRNRTKAKVVRTLSKNVGLPKLEADLCRYQQHHIAGSLLYANFKSILLSKVLKMQQDLEEEKNKTIIKDLEEKVENYEAVLKKKDFIIQDLEIMTKEHEGALEKKDFVIQFMEGSLAEVQAENNSLKNELLKQLEKSEQEKKHLEASLKTKMEKNSNLQKSLKELQEKCLCFGSRCVQRLKDVFHSIGASSEKFTPSAENLPSTLEYIEGEVEALDEVIGGHADFAPW

SEQ ID NO: 367191 - protein, 262 aa, Zea mays
  unsure (1)..(262): unsure at all Xaa locations
  Clone ID: MRT4577_98047C.1.pep
IGTRDLVQEFLXFKVSPTMKEWAMPKLKGDKKEGELVRLPYHYKFNKYFKAPYQEWLDTNVIMSTEILGNYSKKEDQLMTAAFGTRSKRRLNRVLDAIGFEYPDYGRLGGDAGVPKRKRIVSAVDEESTKVTKKKXDFLXLSPEKLSPEPKVAAARKRKNASPXKNVGXEEDTPATPSAAEVEEIMKVMTEPLPVKLSPLAPELTKFFEKDKTTSAEESPALPKKRRIIQIADVIHQTLPPATVSKIAFAETAEAEGAAAEA

SEQ ID NO: 367192 - protein, 103 aa, Zea mays
  unsure (1)..(103): unsure at all Xaa locations
  Clone ID: MRT4577_98048C.1.pep
FPCGGTLALIQPTASFPPSSGASPRSPTRGNRIRRQGEREEIELTFTKLVSRLVHKKEMRILMXGRGRCGKTTMLYKRYLAEIVTTIPTIGFNGETGEYYNIN

SEQ ID NO: 367193 - protein, 39 aa, Zea mays
  Clone ID: MRT4577_98049C.1.pep
PYLRWCEEAAVTVRALIYLHLLSKLFLPCHEVLYQMASG

SEQ ID NO: 367194 - protein, 138 aa, Zea mays
  unsure (1)..(138): unsure at all Xaa locations
  Clone ID: MRT4577_9804C.1.pep
PTLQGGTYFVSSILEAYLLLLPSSSSSYRRRXYVPGSLGRLAARYSVSEPDASDTLAISGDASKXITRRVSVLILPLXHLSASGLIRFLAVVSLLPLSRRTFGIFEESESSTRTPVSSSEALVHSIDSFAKHINQPKG

SEQ ID NO: 367195 - protein, 59 aa, Zea mays
  Clone ID: MRT4577_98050C.1.pep
SRQMVGVKNGRPCGSHVMEKKPNHEFWKAQEPLLKEIRRIRSRSTIVMRNYRKEEEYCR

SEQ ID NO: 367196 - protein, 188 aa, Zea mays
  Clone ID: MRT4577_98051C.1.pep
MSSKKIELDHKDMVHDSAIDYYGKRLATASSDSTVKITNIGGASAPSQLVATLTGHYGPVWRVGWAHPKYGSILASCGYDGRVIVWKEAATGQWSQLHVFDNHKASVNSIAWAPYELGLCLACGSSDGTISVISMRLDTGGCDAATIERAHPVGVTAVSWAPAAALGSMVGSDQLVHKIVSGGFDCVV

SEQ ID NO: 367197 - protein, 703 aa, Zea mays
  unsure (1)..(703): unsure at all Xaa locations
  Clone ID: MRT4577_98052C.1.pep
MTPEGSTQTALAEFRIIAEHIGTRDLVQEFLAFKVFPTIKEWAMPKLKGEKKEGELVRLPYHYKFKKYFKTPCQEWLETIEIMSTEILGNYSKKEDQLMTAAFGTRPKRRLNKVLDAIGFEYPDYGRLGGDAGGPKRKRIASAVDEEGTKVTKKKKEISEKLSPEKLSPEPKVVAARKRKTASPEPKTLVQEENTPATPSAAEVEEILKVMTEPLPVKLSPLAPELTKFFQKDKEASAAESPALPKKRRIIQIADVIHQTPPPVTVSKIAIAETAEAEGTAAEASRVETAEAETGEAEAAGAEAGTTEGSNLETTLEVIDNILLKMAEEAAVAAVNTAIEKGKEQIDDILEEENFNFQDLLGQELTGAEKEELKKYVISCGYKPGATLFGGVNEGKLRCLRNRTEAKVVRTLSKSVGLPKLEADLCRYQRHHIAGSLLYANFKSILLSKVLKVQQDLEEEKNKTIIKDLEEKVENYEAVLKKEGLHHPGPXIMAKEHEGALEKKDFVIQSMEGSLAEVQAENNSLKNELLKQSEKFEQEKKHLEASLKTEMEKNSNLQKSLKELQEKCLGFGSRCVQRLKDVFHSIGASSEKFTPSAENLPSTLEYIEGEVDALDEVIGGHADFCALVASRGTATAFLKAGCTHGKIVNRPNFSLSSSDLIDIPSLARSIGNRFMTQIWVNGGRKMAGDEARSHLKPDDEAEV

SEQ ID NO: 367198 - protein, 86 aa, Zea mays
  unsure (1)..(86): unsure at all Xaa locations
  Clone ID: MRT4577_98053C.1.pep
EEGLVFSLWSDHPFHPPETQFERSVVKGGQCMDICNLEVACPLKSLFWGSQKNPCNGSCXCEIIGRFCLKNPALGXACSXVFTXGV

SEQ ID NO: 367199 - protein, 69 aa, Zea mays
  Clone ID: MRT4577_98054C.1.pep
YIGFSTGLLCVFVFLVAESLIVMSSACRRTMCVVYHVASRSVFSISPFRSNITLLSHVLYAVPRFTHLS

SEQ ID NO: 367200 - protein, 74 aa, Zea mays
  Clone ID: MRT4577_98055C.1.pep
ICRSWFAGAHWDWGSVFSWKRAEYARGAPGDLDPLCGCCWQLGGRLRLRPTLGRALATPRAHGCRLLLPALARA

SEQ ID NO: 367201 - protein, 73 aa, Zea mays
  Clone ID: MRT4577_98056C.1.pep
GRPNTQTDDLLTADYWIRVTQPPHQPRACCHTKNDNKEDGNNTVHTKNLNQLLIDRGMATIQSNTFTSKATDP

SEQ ID NO: 367202 - protein, 47 aa, Zea mays
  Clone ID: MRT4577_98057C.1.pep
FVLFHYQLRFIYRRIFFPLNLNCYLLMYLLGSFLNCAMCFMLGVMAV

SEQ ID NO: 367203 - protein, 352 aa, Zea mays
  Clone ID: MRT4577_98058C.1.pep
MARLLVLRTAPYRHSAHLCAATLLVLPPSQHRHFASFTSPAPFAARRILPSPLRLPIRAVESSPGPTKEDQEPSPAASEAQEQLAPAVPAFEVEELGWGTQLAVKLRMLVAPPWQRVRKGSVLNMKLRGEISDQLKTRFSSGLSLPQICENFVKAAYDPRISGIYLHIEPLRCGWAKVDEIRRHIVDFKKSGKFVVGYMPVCGEKEYYLACACGELYAPPSAYVALFGLTVQQTFLRGVLEKVGIEPEIQRIGKYKSAGDQLARKSMSNEVREMLAALLDNIYGNWLETISSTHGKKKEEIEGFINSGVYQVARLKEEGWVTDLLYDDEVMTLLKERVGQKDKKSLRMVDYS

SEQ ID NO: 367204 - protein, 55 aa, Zea mays
  Clone ID: MRT4577_98059C.1.pep
GRFFFFFFLCFFFFFFFFFFLGFFFFFFFFHRNKHLLPPHLEIEGEDFYKGHFKF

SEQ ID NO: 367205 - protein, 54 aa, Zea mays
  Clone ID: MRT4577_9805C.1.pep
LRTSFFWCRSLAVLAPSILITSPLGLVAVFPRDIRAWLGSAWRRTRGPARNSKP

SEQ ID NO: 367206 - protein, 61 aa, Zea mays
  Clone ID: MRT4577_98060C.1.pep
VEWFKHSTREPIFGRDVSKFYSCFHHTHKPNPVHYDCARTKQLRYTYVQRLIFVRTHHARY

SEQ ID NO: 367207 - protein, 81 aa, Zea mays
  unsure (1)..(81): unsure at all Xaa locations
  Clone ID: MRT4577_98061C.1.pep
TRCASKPVTYQVGGSNRNMGFSSIVIKVWGASFFKGTXRVFLFFKILFQVLRVSNQSLSMCPHHVNQLPHNGLGLPNQLRV

SEQ ID NO: 367208 - protein, 56 aa, Zea mays
  Clone ID: MRT4577_98062C.1.pep
AFVISLPTLATSSFPSTVVYYERIPTSPSRWRCPFLDHTLNVLDKGAVSTPGGSYK

SEQ ID NO: 367209 - protein, 47 aa, Zea mays
  Clone ID: MRT4577_98063C.1.pep
SYCFTPSLVHISREKESIYTYFFIFPKEKKMTKGETYIQILPHLLCD

SEQ ID NO: 367210 - protein, 34 aa, Zea mays
  Clone ID: MRT4577_98064C.1.pep
RDGLFRFEALSGQPCLASSDGKPSGLKELFQQNA

SEQ ID NO: 367211 - protein, 71 aa, Zea mays
  Clone ID: MRT4577_98065C.1.pep
RWRVDDVELWSTCGGLPYQANEEMLRDAFGYYGTIVYVKVINDHAIKGKCQSSVTHTHSITAEHAIAGIDC

SEQ ID NO: 367212 - protein, 153 aa, Zea mays
  unsure (1)..(153): unsure at all Xaa locations
  Clone ID: MRT4577_98066C.1.pep
SHLVYSKAGDKQPRTPTNKLSXPGHSYLNRACQLRSPSNEVGPDGAASEPWRLCTVQQVEDTKAVIRVLSIWSTGIMRHRRPAGANSNTMTATDKIEVGSELRGRDEVESDLAFSYCECPIFSSMISWFFSKSLLVLPKVLDHQNIHDTNRKL

SEQ ID NO: 367213 - protein, 909 aa, Zea mays
  unsure (1)..(909): unsure at all Xaa locations
  Clone ID: MRT4577_98067C.1.pep
IRHEDLNLGGEISPAIGQLKSLQFVDLKLNKLTGQIPDEIGDCVSLKYLDLSGNLLYGDIPFSISKLKQLEDLILKNNQLTGPIPSTLSQIPNLKTLDLAQNKLTGDIPRLIYWNEVLQYLGLRGNSLTGTLSPDMCQLTGLWYFDIRGNNLTGTIPEGIGNCTSFEILDISYNQISGEIPYNIGYLQVATLSLHRNRLIGKIPEVIGLMQALAVLDLSENELVGPIPPILGNLSYTGKLYLHGNKLTGHIPPELGNMSKLSYLQLNDNELVGTIPAELGKLTELFELNLANNNLEGHIPANISSCSALNKFNVYGNRLNGSIPAGFQKLESLTYLNLSSNSFKGQIPSELGHIVNLDTLDLSYNEFSGPVPPTIGDLEHLLELNLSKNHLTGSVPAEFGNLRSVQVIDMSSNNLSGYLPEELGQLQNLDSLILNNNSLAGEIPAQLANCFSLVTLXVIQQLLWARPVIEKLLKVPNGXSFMGNLMLHVYCQDSSCGHSHGTKVSISRTAVACMILGFVILLCIVLLAIYKTNQPQLPEKASDKPVQGPPKLVVLQMDMAVHTYEDIMRLTENLSEKYIIGYGASSTVYRCDLKSGKAIAVKRLYSQYNHSLREFETELETIGSIRHRNLVSLHGFSLSPHGNLLFYDYMENGSLWDLLHGPSKKVKLDWDTRLRIAVGAAQGLAYLHHDCNPRIVHRDVKSSNILLDGSFEAHLSDFGIAKCVPAAKSHASTYVLGTIGYIDPEYARTSRLNEKSDVYSFGVVLLELLTGRKAVDNESNLHQLILSKADDDTVMEAVDPEVSVTCTDMNLVRKAFQLALLCTKRHPADRPTMHEVARVLLSLLPPAAKPPASKAAAASAAAGDYTRFLATAADLRRGGVADDDTGDNSSSDEQWFVRFGEVISKHTLS

SEQ ID NO: 367214 - protein, 96 aa, Zea mays
  Clone ID: MRT4577_98068C.1.pep
SNRDCASFEIKILSARALKHPIVSPKLHTMRTNILKKRLIDISSALLFTINHRYVHINHGEFIAHPLPKRIIHAPDDIQHELGSDGQFFDSDLKVL

SEQ ID NO: 367215 - protein, 93 aa, Zea mays
  Clone ID: MRT4577_98069C.1.pep
VSAKGSLSLILGVRSSSSPRVISFRAQSSSFFPRLQLRPLSPPGLGPVLSTLPDLLFCWLWGTVALWVLGLAIDSCLWPPGALRASCPSFAPG

SEQ ID NO: 367216 - protein, 173 aa, Zea mays
  unsure (1)..(173): unsure at all Xaa locations
  Clone ID: MRT4577_9806C.1.pep
MAIGGFVEAPAGADYGGRVTSFVVLSCIVAGSGGILFGYDLGISGGVTSMESFLRKFFPDVYHQMKGDKDVSNYCRFDSELLTVFTSSLYIAGLVATLFASSVTRRILLGVGLGFTNQSIRAFFLKKRGPPXKNRGAIHNGFELCISIGILIANLIDYGVEKIAGGWGXWRIS

SEQ ID NO: 367217 - protein, 55 aa, Zea mays
  Clone ID: MRT4577_98070C.1.pep
KKIRDLKKVDFSKQEAKLWVKNLSKGEHEGSRGSIGTGPYLFHYIIKGRVGFLTL

SEQ ID NO: 367218 - protein, 57 aa, Zea mays
  Clone ID: MRT4577_98071C.1.pep
VIPTWRRVQRRCMHPVIPVPVSKAESCWMLYPFWSARNARPLCLIKTTDTTKARIVS

SEQ ID NO: 367219 - protein, 117 aa, Zea mays
  Clone ID: MRT4577_98072C.1.pep
EGNGKEGPANQGGAIQPKKRGKGKGKGKENPWKKGGGKKLTQKGKKGKKGGGNQKKKAPGGALLEGKTVNPGRDLARCNQPNGPCFKGNFQCRPGNNFEKKKFGKRPLFLETLLKWA

SEQ ID NO: 367220 - protein, 49 aa, Zea mays
  Clone ID: MRT4577_98073C.1.pep
MSSSLPHSNPIYDRILVFLLRYNVRFLSSSLLKTGNKQKVGLRNSEART

SEQ ID NO: 367221 - protein, 241 aa, Zea mays
  unsure (1)..(241): unsure at all Xaa locations
  Clone ID: MRT4577_98074C.1.pep
PPPPGPAPFAXPPSPPPFPPXDPFALLKLGSPNTPPLPVFKPPPPPXPPIPKLPPFPXPPGPERGGGPNPPPPHPLPXAFYLGCNWPXPPPPSSXILRSPCFIPPPWGLVDPPYPKKGKAPXNGPNPPLFLQKSPPXPPIFFHGKPLPKPPGYGFPPTALLFLPPXPPPPKVFPKMPLNYFPLSKXFPLKKFFTKVPPPKPKIRKGKLNPFYWGTPXPPKKKHVSPPKPILLNLFFPPPLF

SEQ ID NO: 367222 - protein, 148 aa, Zea mays
  unsure (1)..(148): unsure at all Xaa locations
  Clone ID: MRT4577_98075C.1.pep
MSAVELRLXLDELRRLESLAKXPRVQILLVNEIRNVEANMAKATEPXXPESLEVASAPAAAPAASTALSYVTIGSITWXQDHEKIRTYASLXGVDRKVXTTLRXTSADIKVYDAEGQNYRCAVPKLNNEIGPEKSEVVVEPTRAWWYS

SEQ ID NO: 367223 - protein, 88 aa, Zea mays
  unsure (1)..(88): unsure at all Xaa locations
  Clone ID: MRT4577_98076C.1.pep
EKKKLFPRLSTRKKQLNQRIAQPPGDFWPLKGPQKAGGPWATNWKKKKSPSNPKKNGEKPFDLPPSWETAETCPHPPRGXGRAPYLGV

SEQ ID NO: 367224 - protein, 64 aa, Zea mays
  Clone ID: MRT4577_98077C.1.pep
PSMFRLMIGAVPPSFFALIYPGVVLFPGVLWLAMIGRSHDALARPGFRLWVYVAGFPEGGSPDK

SEQ ID NO: 367225 - protein, 117 aa, Zea mays
  Clone ID: MRT4577_98078C.1.pep
MGSNYLTGMNRKVSRRGRVEQETNNASTELDRIEKDIIPMGGFPNYGLGRGDYLIIKGCWGEPKKRGVTFRQSFLKKISGLGLEEIKLKLFDKWSKLGNGGFKITVKKQRFFGKLKA

SEQ ID NO: 367226 - protein, 80 aa, Zea mays
  Clone ID: MRT4577_98079C.1.pep
EELEGYDSPPMADDIHEFTLGDSYAFDEGFSNGYLEEVLRSLPLQEDGQKKLCDAPINADASDGEFEIYEQPSDDEDSDG

SEQ ID NO: 367227 - protein, 183 aa, Zea mays
  Clone ID: MRT4577_9807C.1.pep
KIVRTATAALVLVPLLAAAVQTSALPFIVLHGIGDQCANHGVAKFTKLLADWSGSDGYCLEIGRGTWDSWVMPLQQQADIICNKVKEMKQLRGGYNIVGLSQGNLIGRAVVEYCDDGPPSGFFCIIVDALIKLEIYSDYVQEHLAPSGYLKIPTDMADYLKSCRFLPKLNNEIPDKRNATYKE

SEQ ID NO: 367228 - protein, 44 aa, Zea mays
  Clone ID: MRT4577_98080C.1.pep
HSAQYSTSETQHSCQQWSRAPVSNISNHLVISPACYIASDSSAV

SEQ ID NO: 367229 - protein, 77 aa, Zea mays
  Clone ID: MRT4577_98081C.1.pep
ERPPYYLLWFQSLIYLKQDLQHLNRNCRQYTGITLFKIETYALFIFRRRMQILRCFNHQLCKIRSPEKKNNYTGLLR

SEQ ID NO: 367230 - protein, 308 aa, Zea mays
  unsure (1)..(308): unsure at all Xaa locations
  Clone ID: MRT4577_98082C.1.pep
RPLTKARRATXGFXRRRELGVGGFXQIYKGTLRDGNVVAVKRLYENSYKGVEQFQNEVEILSRLRHPNLVTLYGCTSPRSSHDLLLVYEYVPNGTLADHLHGARASSATGSAAPPLSWPVRLGIAVETASALDYLHAVEPHQVVHRDVKTNNILLDEAFHVKVADFGLSRLFPAHATHVSTAPQGTPGYVDPMYHQCYQLTDKSDVYSFXGVVLVELISSKPAVDMSRAGGDVNLASMAVHMIQCYEIDRLVDPRIGYRTDXGTKRAVDLVAEMAFRCLQPEQDVRPPISEVLGALREAXKMGAGWLR

SEQ ID NO: 367231 - protein, 94 aa, Zea mays
  Clone ID: MRT4577_98083C.1.pep
VPRSRILKRYASCSNGKFTRSAPVSPCAKVQLRHIICRYATFIRAPQQQGLCSVPSFRGTRTNSQSKRESGTASDCCSVGEWRACSAADPVPAC

SEQ ID NO: 367232 - protein, 78 aa, Zea mays
  Clone ID: MRT4577_98084C.1.pep
EKIEPKKIKRKKKKKKTLTTPIELFEGRSSPARLCLKQPAASGIAFPGDTTRAGHFVFSWGYEGRFDRSGHGAGEVDA

SEQ ID NO: 367233 - protein, 71 aa, Zea mays
  Clone ID: MRT4577_98085C.1.pep
GGQIMVSPSSPWKSAVLSDRPPTRERCTVCPVYSWSMSLRPIRRQSTLSVATSTYQMTVRLSSTTRRWRHS

SEQ ID NO: 367234 - protein, 149 aa, Zea mays
  Clone ID: MRT4577_98086C.1.pep
RAGVQYASKDVKALKSVADAHKDRSIHAYKKVLETYKEQLVDDPIVYAHLNQLYENLLEQNLLRLIEPFSRVQIDHVAALINLPRAVVETKLSELILDGKLKGILDQGSGDLIIFDEDTEDKTFETTLQVYKELNLVADKLYAKAARLH

SEQ ID NO: 367235 - protein, 60 aa, Zea mays
  Clone ID: MRT4577_98087C.1.pep
TIKLHTLSNSSRLLVAHHTLLGLAKLLYHNQLYTRINQQHFIMTVSSYKENITLVDAIWI

SEQ ID NO: 367236 - protein, 74 aa, Zea mays
  Clone ID: MRT4577_98088C.1.pep
TQLYTHAEKTKRVQEHASLDVAPRPPPLLPQSHTLTHHKQAATKVRRGTHYCEPSNYTRMQYRIKQVCGCVRRS

SEQ ID NO: 367237 - protein, 37 aa, Zea mays
  Clone ID: MRT4577_98089C.1.pep
QPASSGGYVFHEHHEKKKDHKDAEEASGEKKHHHLFG

SEQ ID NO: 367238 - protein, 525 aa, Zea mays
  Clone ID: MRT4577_9808C.1.pep
MAIGGFVEAPAGADYGGRVTSFVVLSCIVAGSGGILFGYDLGISGGVTSMESFLRKFFPDVYHQMKGDKDVSNYCRFDSELLTVFTSSLYIAGLVATLFASSVTRRFGRRTSILIGGTVFVIGSVFGGAAVNVYMLLLNRILLGVGLGFTNQSIPLYLSEMAPPQYRGAINNGFELCISIGILIANLINYGVEKIAGGWGWRISLSLAAVPAAFLTVGAIYLPETPSFIIQRRGGSNNDSARGLLLQRLRGTTRVQKELDDLVSATRTTTTGRPFRTILRRKYRPQLVIALLVPFFNQVTGINVINFYAPVMFRTIGLKESASLMSAVVTRVCATAANVVAMVVVDRFGRRKLFLVGGVQMILSQAMVGAVLAAKFQEHGGMEKEYAYLVLVIMCVFVAGFAWSWGPLTYLVPTEICPLEIRSAGQSVVIAVIFFVTFLIGQTFLAMLCHLKFGTFFLFGGWVCVMTLFVYFFLPETKQLPMEQMEQVWRTHWFWKRIVDEDAAGEQPREEAAGTIALSSTSTTT

SEQ ID NO: 367239 - protein, 59 aa, Zea mays
  Clone ID: MRT4577_98090C.1.pep
MSEEKHHHFFNHHKKDEEQPAGEYGYSETEVVTATGEGEYERYKKEEASGEKKHHHLFG

SEQ ID NO: 367240 - protein, 93 aa, Zea mays
  Clone ID: MRT4577_98091C.1.pep
MSEEKHHHFFNHHKKDEEQPAGEYGYSETEVVTATGEGEYERYKKEEKEHKHKQHLGEAGYVFHEHHEKKKDRSTGRRATELASSGAHNHTPV

SEQ ID NO: 367241 - protein, 52 aa, Zea mays
  Clone ID: MRT4577_98092C.1.pep
ELSISYVIAGITLRTLIRLVVLLTSGVRNLLTIIVALRYLNDLLSHYLGTSL

SEQ ID NO: 367242 - protein, 61 aa, Zea mays
  Clone ID: MRT4577_98093C.1.pep
MPEEKHHHFFNHHKKDEEQPAGEYGYSETEVVTATGEGEYERYKKEEKEASGEKKHHHLFG

SEQ ID NO: 367243 - protein, 48 aa, Zea mays
  Clone ID: MRT4577_98094C.1.pep
AVRYDYLTDYLANKSELLIISNPAHNTVPVLIHNGTPVYQSTVIVHYI

SEQ ID NO: 367244 - protein, 52 aa, Zea mays
  unsure (1)..(52): unsure at all Xaa locations
  Clone ID: MRT4577_98096C.1.pep
AQGEWLTGLPSAAYLRXRLPRDNGLDPLCLAEDPXNLTWYVHAELVNGRSAM

SEQ ID NO: 367245 - protein, 91 aa, Zea mays
  Clone ID: MRT4577_98098C.1.pep
MSEEKHHHFFNHHKKDEEQPAGEYGYSETEVVTATGEGEYERYKKEEKEHKHKQHLGEAGGYVFHEHHEKKKDHKDAEEASGEKKHHHLFG

SEQ ID NO: 367246 - protein, 71 aa, Zea mays
  unsure (1)..(71): unsure at all Xaa locations
  Clone ID: MRT4577_98099C.1.pep
KLKPGPTTPLFLLLLLGSVTADITDGNXEHLXREHSLIKPYXGVGSSSMPLWDFQGSTMLTSQYVRLTPDE

SEQ ID NO: 367247 - protein, 119 aa, Zea mays
  unsure (1)..(119): unsure at all Xaa locations
  Clone ID: MRT4577_9809C.1.pep
FGTRLPPPRSPLRRPSSKAAPPPDPPASGRPRLLPAAPXSDPTPPPPPAPPARPPVSQLPPPPPSHLPPARPSDPTACRAPAAPYQTKRVRFAFTASTTPPRXTTPPPYPAAIMPPPPR

SEQ ID NO: 367248 - protein, 90 aa, Zea mays
  Clone ID: MRT4577_980C.1.pep
GYNPFGKNPLENLNNLSKKVHNHPCKSCQWHPPPPQETLKKKKTPHLTKNQGQKNLKGYLTNQMPTKKLTAQKYLPLQMSKNPILKFPLK

SEQ ID NO: 367249 - protein, 54 aa, Zea mays
  Clone ID: MRT4577_98101C.1.pep
KKKKKKKKKKKKKKKKKKKKKKKKKKKKKKKKKKKKKKGGPPKGFQLYARGIAS

SEQ ID NO: 367250 - protein, 104 aa, Zea mays
  Clone ID: MRT4577_98102C.1.pep
CTPIGEHPAVAQTAQWLKRLCSSAQYPSDEIIRSISHPRWIFTQNDRLPSCVWGACVPDFAVRRLPYAAYSSVATRGTVCDKDHQPPMDRADNKRRPQPYLEPN

SEQ ID NO: 367251 - protein, 102 aa, Zea mays
  Clone ID: MRT4577_98103C.1.pep
RRETLRTLFKKKKKKRGVGVRGERDGEGVLAATELARCVELVMGQGTKATAIRERVKALREMAQQAARAGGPAERNLEDFVKKKKKKKGGSASEGSVTVRAC

SEQ ID NO: 367252 - protein, 76 aa, Zea mays
  Clone ID: MRT4577_98104C.1.pep
VGASGGSWASWVDKGGFRILGSVRGWRLSTWGEIFLCVVWGPTVVYIPPLCAVRRRGKRTGVWILLEPNSELTSAG

SEQ ID NO: 367253 - protein, 46 aa, Zea mays
  Clone ID: MRT4577_98105C.1.pep
VNEDNILCEALSLYITHILFFFCVWGFAFFLSERTRGIFTIPRSVP

SEQ ID NO: 367254 - protein, 36 aa, Zea mays
  Clone ID: MRT4577_98106C.1.pep
SFIPNCEPLKILSMKTRMLIFVNCGLSFVKMVLIIP

SEQ ID NO: 367255 - protein, 56 aa, Zea mays
  unsure (1)..(56): unsure at all Xaa locations
  Clone ID: MRT4577_98107C.1.pep
LFSSSRLWGRLPLTSHVMNQRHPDELCDQVSYSVLYACLSQNPDSXVPCETCINTN

SEQ ID NO: 367256 - protein, 113 aa, Zea mays
  Clone ID: MRT4577_98108C.1.pep
FFFFFFFFFFFFCGILNFLFFFFYFWGMVTSQINTWGGFNHRGECLKQGPKQKKKGGAHKKGGAGKKSSGVGKKNGGPNMGFRLLMGKLQFPPEGKKTGGSPKKRGREIGWAP

SEQ ID NO: 367257 - protein, 85 aa, Zea mays
  Clone ID: MRT4577_98109C.1.pep
EKKRAKRGHQLTAERKRRRATNPSPRPPPSPRTMAFPTVLKDLMYADSHEWVKVEGDSTTVGITDYAQETCGCFCRQEWTLVSGG

SEQ ID NO: 367258 - protein, 85 aa, Zea mays
  Clone ID: MRT4577_9810C.1.pep
ALLRNKPPGHFMASDLLKILWVCNEGRQTVLVLRELSKRLYNPLHDLKRKVELDLRNGRTRALEATNLWMLKVAVALYQILSRGS

SEQ ID NO: 367259 - protein, 40 aa, Zea mays
  Clone ID: MRT4577_98110C.1.pep
LGPLIRYFSHKLSPDGSTQRTSPILDPSRRSYPAKGSNNT

SEQ ID NO: 367260 - protein, 218 aa, Zea mays
  Clone ID: MRT4577_98111C.1.pep
MASSSSFLLLAALLALVSWQATASDPSPLQDFCVADMNSPVRVNGFVCKNPMEVNADDFFKAANLDKPRMPNKVGSNVTLINVMQIAGLNTLGISIARIDYAPLGQNPPHTHPRATEILTVLEGTLYVGFVTSNQPAPNKNKFLSKVLNKGDVFVFPVGLIHFQFNPNPHQPAVAIAALSSQNPGAITIANAVFGSDPPISDDVLAKAFQVEKNTIDY

SEQ ID NO: 367261 - protein, 51 aa, Zea mays
  Clone ID: MRT4577_98112C.1.pep
MVIAPMAEANTDHAPEADSPHDGPTQPTAAPGPQRVEGLTGNEDDKHDYTN

SEQ ID NO: 367262 - protein, 50 aa, Zea mays
  Clone ID: MRT4577_98113C.1.pep
TVSIMIYEAFERRFVIVAPGLRDVHHGHVEAVNQRPFCNVTGSSFALKGN

SEQ ID NO: 367263 - protein, 238 aa, Zea mays
  unsure (1)..(238): unsure at all Xaa locations
  Clone ID: MRT4577_98114C.1.pep
MPMESVAVVAVPFPAQGHLNALLHLSLQLAARGVPVHYAAPMEHVRQARSRVQGWGDDTLCRVHFHELSVSAYASPPPDPAAESAFPSHLVPMWEAFTTDAPAPLAALLGGISASCRRFVVLYDIANGFAAEEAARLPNGEGFGLVCTAVSCIVGRTDAGSRLVRERGLDFFPVNSFVTEEFLATVGKRARWAQSIPCSVGILANTCRALEGEFIDIFAQQLAAXGKNLFGVGPLNPL

SEQ ID NO: 367264 - protein, 79 aa, Zea mays
  unsure (1)..(79): unsure at all Xaa locations
  Clone ID: MRT4577_98115C.1.pep
SQNTPKHNTFPTPRATTTAWKVNPTSLQQENRQPRAHPPRPQGRSPPSPQKLINPWPPHAPPSSXVKTTRPTTAPGHPE

SEQ ID NO: 367265 - protein, 110 aa, Zea mays
  unsure (1)..(110): unsure at all Xaa locations
  Clone ID: MRT4577_98116C.1.pep
GPAKAKSVLFVSINKVHVFTKRKLSLRPLSPQGXATNRVCMVKDLDTEDAGSALYEKRITELMKVVRDKLALQLGERKLETDKMASDKREEMMGVLRKMTSAATHTDMQK

SEQ ID NO: 367266 - protein, 65 aa, Zea mays
  Clone ID: MRT4577_98117C.1.pep
RNKMPIVSILRLKVTKMFLFFQMEYEKSIRRLFCHADEVTKSLLLYYYYPPLLKSDALLQASLII

SEQ ID NO: 367267 - protein, 99 aa, Zea mays
  Clone ID: MRT4577_98118C.1.pep
MMMTLFTERVRSKMMQCVLLERPLFRNSTLWSIRASPDLNALTLAKTTSICFPSGMDDQRNFDITILPEDRYYMPSAITIPFKWTHLILMILRRTHAQT

SEQ ID NO: 367268 - protein, 55 aa, Zea mays
  Clone ID: MRT4577_98119C.1.pep
CIPCLPVTTLFAISFTGLACSGNRASLYVSLYSYHFSGAILSTLETVESGSNLNT

SEQ ID NO: 367269 - protein, 138 aa, Zea mays
  unsure (1)..(138): unsure at all Xaa locations
  Clone ID: MRT4577_9811C.1.pep
IRPLDVECYIREDGGAQLILFLTDPSLVPTRILVVYLDWFAGKGPTFLSLHRRRPGAMASAGLKRKACSFAALTARKRPERPPGSLPRRPTGPPSLRTSPASSPSNWXGGGRDGLHGASALCARTGVPSPPAPAISRC

SEQ ID NO: 367270 - protein, 75 aa, Zea mays
  Clone ID: MRT4577_98120C.1.pep
SAAALSLLCEARDSVRRGINHKRDSWAKLLGYQAPVLCSLSEITKGFGDISPLLLFDIHKGTKQQYMRYRKSCLK

SEQ ID NO: 367271 - protein, 45 aa, Zea mays
  Clone ID: MRT4577_98121C.1.pep
PASKEQGAPHDENRPVGYLGNVTYLADRVANIYVTNMQNPLAGPN

SEQ ID NO: 367272 - protein, 91 aa, Zea mays
  Clone ID: MRT4577_98122C.1.pep
PHRLRPFREAFRGTFIAAGGYDRAEGDKVVEEGYTDLVSYGRLFLANPDLPRRFRLPEAPLNKYDRTTFYTSDPVIGYTDYPFLADADADK

SEQ ID NO: 367273 - protein, 307 aa, Zea mays
  Clone ID: MRT4577_98123C.1.pep
MSFKIQLLSSIAIFAFALHLHPCVSTEFRRELSSWTTGIATWYGDANGAGSEGGACGYQYAVDQPPFSSLIAAGSPFIYDSGNGCGSCYQVVCSSNQACSGYPVTVVITDQGPGGGPCLSQASDGMCMNEGAHFDMSGTAFGAMAKPGMADQLRAAGLLQIQYTRVQCEWPGVDVTFSVDSGSNPNYLAVLIEYEDCESDLSAVDIMQSSAGQWVPMQHSWGAIWRLDSGSALQGPFHLRLTFSSGRVLIASNAIPAGWNAGAAYRAGGVAVTRARPRSGGSQAGEAAAGTFRGLVYHLLMFVVLAL

SEQ ID NO: 367274 - protein, 277 aa, Zea mays
  unsure (1)..(277): unsure at all Xaa locations
  Clone ID: MRT4577_98124C.1.pep
MSFKIQLLSSIAIFAFALHLHPCVSTEFRRELSSWTTGIATWYGDANGAGSEGGACGYQYAVDQPPFSSLIAAGSPFIYDSGNGCGSCYQVVCSSNQACSGYPVTVVITDQGPGGGPCLSQASDGMCMNEGAHFDMSGTAFGAMAKPGMADQLRAAGLLQIQYTRYVQCFMDIAALHQNGCLQATMNYPMSSNLFTLTFVTMHAFYGYXVQCEWPGVDVTFSVDSGSNPNYLAVLIEYEDCESDLSAVDIMQSSAGQWVPMQHSWGAIWELDSGSAL

SEQ ID NO: 367275 - protein, 75 aa, Zea mays
  Clone ID: MRT4577_98125C.1.pep
EFFLPLQLRHMTLDCQNSSAVAEHPMNSEVPGRRPYSLHARSCPQIYQSSSTTNIYQLKICANVFIDNITCFFIV

SEQ ID NO: 367276 - protein, 99 aa, Zea mays
  unsure (1)..(99): unsure at all Xaa locations
  Clone ID: MRT4577_98126C.1.pep
VCVCFLLFLLWSLGLGPRFSRFLCFGFFGVPVLLFPFSLXPFGLLACVVPSVFGFLSFRFRLRCFRFLPFCSPLLVLSSSWLVRGLPRVPFGPVCFFGF

SEQ ID NO: 367277 - protein, 132 aa, Zea mays
  Clone ID: MRT4577_98127C.1.pep
TVQHHIEPSREMGIQLRFRFSPSAVVSPRGRRVSRCLSFASTARPPVGLAWLCLLPSIQAPSRPAAQRRGVYIEPDPRDPRQSAIAAPCLNLSSSPASLLGTALCLLLALAFFLYLAPLHHNHRQRRAVVSD

SEQ ID NO: 367278 - protein, 127 aa, Zea mays
  unsure (1)..(127): unsure at all Xaa locations
  Clone ID: MRT4577_98128C.1.pep
NTPETKMLSLLMHLALITCDDNATHTRECXQARIAYLFPRYLPSIIAXLCENPHHQPYLLEHAIGASNIHXSHSLRQQSPALFLVQSWVQTIMAHQLHELVLPVINQVAIXNLYPYSXEQQFLSFNQ

SEQ ID NO: 367279 - protein, 121 aa, Zea mays
  Clone ID: MRT4577_98129C.1.pep
GRVQRLPIGGDRADLALYRRRGAGPPGERELGCLAGGRAMRGQQVAWPSKRRKGNGTHVARGGLTTAEGEKRNLSWIPILPARLDVVLNRWCAREGGCGAGLPPRAYVESRDCSRPASRYP

SEQ ID NO: 367280 - protein, 50 aa, Zea mays
  Clone ID: MRT4577_9812C.1.pep
LMYYKLETPEEIESPPPRIEPEDTDYNSKAWLMTNSYREDHPQELMGKKL

SEQ ID NO: 367281 - protein, 198 aa, Zea mays
  unsure (1)..(198): unsure at all Xaa locations
  Clone ID: MRT4577_98130C.1.pep
KKKKKRKKNKKKKKKKKKKKEEKTKKKKTKKKNNKKQKPKRKKKKKKKKKKKKKKQKKEKKKKKKKKQKKKKKKKKKKKKKKKTKKKKKKKKKKKKKKKKKKKKKKKKKKKRKKKQKTKKKQTKQKKKRKQSKKKKTHKKKKRXNPNTSNKVRKQGKKYATDKTRKVSGQADGTVAGVVPKGGSSAAVPPGRAKGGDH

SEQ ID NO: 367282 - protein, 50 aa, Zea mays
  Clone ID: MRT4577_98131C.1.pep
HVFLSCLANQTKCGPPTSRARRELNSCRHPSCTRSSIPYSQSHESLAYIV

SEQ ID NO: 367283 - protein, 90 aa, Zea mays
  Clone ID: MRT4577_98132C.1.pep
SAAALFFFFFFFFFFFFFFFFLGIQVAGRNTPSGPNTLKNPRDFMVYRPKIKPFYVLFTMNWPTLNYLSSNPLKLLHNFSRPSFSTLLIS

SEQ ID NO: 367284 - protein, 74 aa, Zea mays
  unsure (1)..(74): unsure at all Xaa locations
  Clone ID: MRT4577_98133C.1.pep
LEARRAQPDTFSIRPNXHXKXELHYMPHNSPPPLLSPRTSLSIDMTAAAAVLRLLPVSSTMHFLPPPMLPFAAN

SEQ ID NO: 367285 - protein, 268 aa, Zea mays
  unsure (1)..(268): unsure at all Xaa locations
  Clone ID: MRT4577_98134C.1.pep
MGDAKPSVLITMPSRDRDRDRLVPTAAVATHESPSALTVGDSDDDKSKPSSASAAAAAAQTGREAXSISVILFPIAVTFYVTWWFFRFVDGFFSPIYAHLGIKIFGLGFVTSISFIFVVGLFMSSWLGASILGLGEWFIKRMPFVRHIYDASKQISAAISPDQNKHAFKEVVIIRHPRIGEYAFGFITSEVLLQGYSSEEQMYCVYVPTNHLYIGDIFLVSSSDVIRPNMSVREGIEIVVSVGTSMPQVLSILETEPNQLNRIRSTRS

SEQ ID NO: 367286 - protein, 238 aa, Zea mays
  Clone ID: MRT4577_98135C.1.pep
MPAVVQNHRHPPSPQQETRGERRQLQPAAPAESLETERDLRIAMGDAKTSVLITMPSRDRDRDRLVPTAAVATHESPSALTVGDSDDDKSKPSSASAAAAAAQTGREAFHKVVHSWASKKFMTGCVILFPIAVTFYVTWWFFRFVDGFFSPIYAHLGIKIFGLGFVTSISFIFVVGLFMSSWLGASILGLGEWFIKRMPFVRHIYDVSKQISAAISPDQNKHAFKEVVIIRHPRLAIC

SEQ ID NO: 367287 - protein, 116 aa, Zea mays
  unsure (1)..(116): unsure at all Xaa locations
  Clone ID: MRT4577_98136C.1.pep
RAGTNTRADELSIRRPPDXXKVGLNPNTNGRPHARGTGEDPHPNAEQPTRGEDTTHTQETDQEQNSHTTHRGDASPRQTARKRPGRAKNPRAQKQNRTQPQAETPLAWAKQAAAPQ

SEQ ID NO: 367288 - protein, 93 aa, Zea mays
  Clone ID: MRT4577_98137C.1.pep
EVAKENADVIIMDDNFSTIISVAKWGRSVYINIQKFVQFQLTVNVVALMVNFVSASFTGSAPLTIVQLLGVNLIMDTLGALALATEPPNDAMM

SEQ ID NO: 367289 - protein, 65 aa, Zea mays
  Clone ID: MRT4577_98138C.1.pep
WRSPKGELREKREFTCPKVYRCPSKLIFPSRIILFFNSPQLSYINMNLYTCVSHEYVVLKQRVHM

SEQ ID NO: 367290 - protein, 160 aa, Zea mays
  unsure (1)..(160): unsure at all Xaa locations
  Clone ID: MRT4577_98139C.1.pep
EATNSTKEGGGGTNNGRQTCCFLQLLGLSGSVATATIIPRXNKTPIAYLLPQNLSPAXGGGEKTPIEQPYMNQQAIATGILPLSLLVLQQPANIQQQPPVHHLAQQNMAAQQLQQLVLTNLAEYSQQHQFLSYHQLAEKNSADYXQQQLPFNQVVADYPQ

SEQ ID NO: 367291 - protein, 115 aa, Zea mays
  Clone ID: MRT4577_9813C.1.pep
KQRRPHRTLVSASLHLFKAKKTGGAGTFFFFPPKAHPHTTQHELGLQPAQPCHMAPHQPNDIMWDPFQRSGKGKNPDLYPNKTTTHKTVQHLEFPPSSLTTDLLDESHARPYNFV

SEQ ID NO: 367292 - protein, 71 aa, Zea mays
  Clone ID: MRT4577_98140C.1.pep
LVNCYIYSHMCVAPTYMSCGCTASFFSQAFAAAFGVAHPSINRKKLNLSPPCVHLYVLMQLLYPLIVPSIR

SEQ ID NO: 367293 - protein, 58 aa, Zea mays
  Clone ID: MRT4577_98141C.1.pep
LGWPCKFLPFRLGIKASYWFMLNIKYFLSCCSYVFYVFQTWIGIFVSYKKAGPTVTSH

SEQ ID NO: 367294 - protein, 137 aa, Zea mays
  unsure (1)..(137): unsure at all Xaa locations
  Clone ID: MRT4577_98142C.1.pep
MAPRGERSXGAMIPHDEEPVXEGENRPEGKKYXEEKRLPSFKYDPGEVHNGKNKDKTSVXTYEIYIFTGMKQAHPDIRISTEGMSIMNSFISNVLLTFTAXSAKLTXYHRTPTITSREIQTSVRMHPNGELSKYAVS

SEQ ID NO: 367295 - protein, 70 aa, Zea mays
  unsure (1)..(70): unsure at all Xaa locations
  Clone ID: MRT4577_98143C.1.pep
KGPLKAILGYSXEDXLFSPVFQGHTRSSVFFPKPVIALMGTFVKVVSWYHFKGETSPRVVALFPPINSPK

SEQ ID NO: 367296 - protein, 61 aa, Zea mays
  Clone ID: MRT4577_98144C.1.pep
SGSDHIIFVGDLAHGVTDSMLENVFRAKYPSVRGANVVVDRLTGWPKGYGFVPFGDLNNAL

SEQ ID NO: 367297 - protein, 313 aa, Zea mays
  unsure (1)..(313): unsure at all Xaa locations
  Clone ID: MRT4577_98145C.1.pep
GGWKDRTTVEDMDLAVRAMLQGWKFVYVGDIXTPVLTIITTFSHGTQEHNKKRILTILRIYNCICMYVRXVKSELPSTFKAYRFQQHRWSCGPANLFKKMMVEILENKKVSLWSKIYLWYNFFFVGKVAAHTVTFIYYCCAIPVSVLLPEIQIPLWGVVYIPTLITLLKALGTPSSFHLVILWVLFENVMSLHRIKAAASGLLDAGGRVNEWVVTEKLGDTSKAKPGANGSDDVKVIDVKLTEPLVPKLVKRRARFWERYNCSELFVGTCILLCGFYDLLFAKKGYYIFLFLQGTAFLVVGFGYVGTLPHCNA

SEQ ID NO: 367298 - protein, 78 aa, Zea mays
  Clone ID: MRT4577_98146C.1.pep
TPLNLPRLGRAPSDGALPIRFLPLRFPCAEAGLPEGCESLDALPGLGLLRNFNDACAMLRGPLVALLRDREGDAPLAS

SEQ ID NO: 367299 - protein, 62 aa, Zea mays
  unsure (1)..(62): unsure at all Xaa locations
  Clone ID: MRT4577_98147C.1.pep
FGERKXKKVFFPPRRSWWFSLYILKHQGKKTCVFPPCLGPRKVIFRGRGYPNPACYFYPQVA

SEQ ID NO: 367300 - protein, 103 aa, Zea mays
  Clone ID: MRT4577_98148C.1.pep
YRSSRVLLNSSDRRQEIYVTLKTNLSSTRTCYSSALLRTVMTHDCMHACATPAGDPSSVTQPERRRSRRRRRHRRRGSSSPPRAMPPMLLTQGGRTDHRQSRP

SEQ ID NO: 367301 - protein, 84 aa, Zea mays
  Clone ID: MRT4577_98149C.1.pep
KKVFSRHKKGVRKHGEQRADPWRADGTVVDRAQRVVPAAQARMVLERLHRAHARRHHQRRRLPARRRHPAAGLDSYGSCSVRVV

SEQ ID NO: 367302 - protein, 98 aa, Zea mays
  Clone ID: MRT4577_9814C.1.pep
GNKVDVKNRQVKAKQVTFHRKKNLQYYEISAKSNSNFEKPFLYLARKLAGDTNLHFVESPALAPPEVQIDLAAQQQHEAELLAAASQPLPDDDDDQFE

SEQ ID NO: 367303 - protein, 104 aa, Zea mays
  Clone ID: MRT4577_98150C.1.pep
IPSTTTRRTTPTNRSSMNRACPAHILCAPNTIHASPWKESQPNSLGDIPRTKPPSSHIPSQVYDLRHLNLNILRHSPAHISRCSRTSHSTPHPRRYLVMLEYKM

SEQ ID NO: 367304 - protein, 160 aa, Zea mays
  unsure (1)..(160): unsure at all Xaa locations
  Clone ID: MRT4577_98151C.1.pep
LFLCERSEVWHFGFVHPYGKRGGGCKKKKRNAAKQEPEKPPGADNTTKTSGEDQKTGQELAAPLKEATEVGDETEHKKERAGHALTRPKPMATRPENTRGDTLKLRKQLGDHLRQFLKEPTKXKVMHGAGRGTIRPPRDFSIYARGRPDTSQASKNPQMD

SEQ ID NO: 367305 - protein, 33 aa, Zea mays
  Clone ID: MRT4577_98152C.1.pep
IVSTHPRVVKTFKLAQYPSRFPVRHKLKCLAPS

SEQ ID NO: 367306 - protein, 63 aa, Zea mays
  Clone ID: MRT4577_98153C.1.pep
TSPRLRSPWGASIRASVTSPYCRKFNDQLIKNASYICTPSKATLAAYEFTGTISKRLSSINVK

SEQ ID NO: 367307 - protein, 187 aa, Zea mays
  Clone ID: MRT4577_98154C.1.pep
AVVHAASSSSTSSAASAARRLAIVPLGRSAASRPPGATGCSCPPPPPPGAAVGVGVCGSGVDWLFMTTRTDESSLQRCAPVLFSIQATCIELNGWLIGLLFGAAISFLWLRAAPAAIGLVWTLRTGTCAIIAVLLCYQMWTRNPLVHKGRTSPRPATNPLAILCLRDLLPKGGRGKKPVVIRQKTLA

SEQ ID NO: 367308 - protein, 124 aa, Zea mays
  Clone ID: MRT4577_98155C.1.pep
GTHDHYNGCSGLRKSIVRQWRRIPCGAASVGPNQVFQRRCSGHEQSVWCCWKYGFVMEVSRVFIKIRLSGRFVFGWYPRATLYEWCRQGFHKVVCLQLYRLPQHGGTLAAGALVGLGASLLPKR

SEQ ID NO: 367309 - protein, 98 aa, Zea mays
  Clone ID: MRT4577_98156C.1.pep
SLPPSAVPRVAAALTLSLHLSLSAPRSWDPPPNPRGELVQRARRPGTLASAHAFLGLGRPFCALPTARLQHHPEKVRPPRPPHSETRRTDVPERDWRA

SEQ ID NO: 367310 - protein, 106 aa, Zea mays
  unsure (1)..(106): unsure at all Xaa locations
  Clone ID: MRT4577_98157C.1.pep
MAPETMLLGVCSALMLGGVTSALEDHVASDVVGLARCTDCTRNNMKAYDLFKGLXVDIKRKNSNWDFETNAVSEIQSSGAFNVLLGVDLHCADCHAQIHSYLYNAP

SEQ ID NO: 367311 - protein, 96 aa, Zea mays
  unsure (1)..(96): unsure at all Xaa locations
  Clone ID: MRT4577_98158C.1.pep
GSLFRLLQKNAAGVKKKPGVHIALEIARRMKYLSHXCIPTMAHCKLKFLNLLFDXNLTAKVANFGLXRFNHATFLTTKTGKGTPYWMAPKIFPNEP

SEQ ID NO: 367312 - protein, 55 aa, Zea mays
  Clone ID: MRT4577_98159C.1.pep
TVSKGMIRQRYGRFDGSTPVSLIMPEILHATPRRWMPLGLPSWIGHRIAIVLTST

SEQ ID NO: 367313 - protein, 41 aa, Zea mays
  Clone ID: MRT4577_9815C.1.pep
SVLIQKKKKKKKKKKKKKKKKKKKKKKKKKKKNKKKKKQKK

SEQ ID NO: 367314 - protein, 131 aa, Zea mays
  unsure (1)..(131): unsure at all Xaa locations
  Clone ID: MRT4577_98160C.1.pep
PGLCCWSADPSVESVVSSKPKLHLPPGTWTLPAIGNLHHLIGGPWIHGTLRRVSQKHGALMMRRLGEVPRVIASSPEAGEDILKTHDTALADRLTTAATGAMTDDPTNMVLSPDYERWXSWRTSALVELLS

SEQ ID NO: 367315 - protein, 121 aa, Zea mays
  unsure (1)..(121): unsure at all Xaa locations
  Clone ID: MRT4577_98161C.1.pep
LIKQEAIAAHQNLGRGQHEAPTVSIDSREQIYHHIMDSGAGYLTMSDRAIRXKIVFQDVIDLXDDFDYVXGLSLRDARTXYVYIRYDAFLLHTKNLSENSXTSTILDTMNDDVYALHHIMT

SEQ ID NO: 367316 - protein, 452 aa, Zea mays
  unsure (1)..(452): unsure at all Xaa locations
  Clone ID: MRT4577_98162C.1.pep
MRVKVISRSTDDYTRERSQDLQKVFRNYDPALRSQEKAVEYTRALNAAKLEKIFAKPFIGAMDGHIDAVSCMAKNPNHLKAIFSGSMDGDVRLWDIAARKTVCQFPGHQGAVRGLTTSTDGDLLVSCGVDCTVRLWKVPMLKMVDTSERAGDNSQPSAVYTWKHAFWGXDHQWDGNLFATVGAQVDIWDPDRSEPINSFEWGKDTVLSVRFDPGDSNILITSGSDRSLTLYDLRMSSPARKLIMKTRCNSVCWNPREPMNFTAANEDTNCYSFDARKLDEAKIVHKGHVSAVMDIDYSPTGREFVTGSYDRTVRIFNYLGDHSREIYHTKRMQRVFCVKYTYDGTYLVSGSDDTNLRLWKSKASEQLGVLLPRERKKQEYQDALKERYKHLPEVKRIVRHRHLPKPIYKAANLRRTMIEAESRKEERRRKHSAPGSMPVQPFRKRRIIREVE

SEQ ID NO: 367317 - protein, 91 aa, Zea mays
  unsure (1)..(91): unsure at all Xaa locations
  Clone ID: MRT4577_98163C.1.pep
MLMMMCAHGADIIKSKGGKITHEPGAVXRGSTVIAFAQDPYGYMXSLYMRADTPEPVCQVMLRGGDHDRYIKFYDKALGMNLLMMKVVPDY

SEQ ID NO: 367318 - protein, 64 aa, Zea mays
  Clone ID: MRT4577_98164C.1.pep
ASPQPRPLASAQQGPFNPSDASMTGSEIGGENMPDFPSHCFPKRKGLPFLIIVYPIETDFIGYC

SEQ ID NO: 367319 - protein, 213 aa, Zea mays
  unsure (1)..(213): unsure at all Xaa locations
  Clone ID: MRT4577_98165C.1.pep
QKCLRRIPRAHQPPPPSSSFARRSLRRGREPARRPTLPQSSDPPWPPPPXPPSNLSPPRAAAPXPPPRRPPAPRFPSSPPPPTAPPPPPPTRSWRTWPRSPPSSRRSSTPSRRSTTGIRTPRSGSGRSTPAPSASAPCSGTSSGRGRAGRRRWRGSPTRPWSGDSPPRXRRGGGWAGRGRRRPRRRRVRVRHRRQGRGAGWAGGAQACWQPGR

SEQ ID NO: 367320 - protein, 29 aa, Zea mays
  Clone ID: MRT4577_98166C.1.pep
FSERRRLGYRRPSSRFRSDKGDNADSRYQ

SEQ ID NO: 367321 - protein, 56 aa, Zea mays
  Clone ID: MRT4577_98167C.1.pep
SPFSAASSSSSPSPASRKNFCKPHKWLVKPYSKAFIITKHTVYTNKMPNKYFKGKH

SEQ ID NO: 367322 - protein, 71 aa, Zea mays
  Clone ID: MRT4577_98168C.1.pep
LFQLLSKGTVLEAMEFTVQHTLQARLRPPIYINYELSRSSWYIMENQIKIAGSYLLDVFYRHNICFLFNVN

SEQ ID NO: 367323 - protein, 86 aa, Zea mays
  Clone ID: MRT4577_98169C.1.pep
RILETVGTDERSLLTDATQRNATQHSCAYSTASLQYLQLQSTTLARRCWWSLAELPRPPRYYDYYWARQPPPSSLHGTWPSGCHLQ

SEQ ID NO: 367324 - protein, 130 aa, Zea mays
  Clone ID: MRT4577_9816C.1.pep
MVRVSVLNDALKSMYNAEKRGKRQVMIRPSSKVIIKFLTVMQRHGYIGEFEYVDDHRAGKIVVELNGRLNKCGVISPRFDVGVKEIEGWTARLLPSRQFGYIVLTTSAGIMDHEEARRKNVGGKVLGFFY

SEQ ID NO: 367325 - protein, 119 aa, Zea mays
  unsure (1)..(119): unsure at all Xaa locations
  Clone ID: MRT4577_98170C.1.pep
MSSIIGAADDQATPASSGAAYATPQGETATPSVILASPLPPPQMVVVALDATRDHRDDEIKTAFRNLVERGDILRARDSLLVLGVLHSITHPNVEXAPPGRPTAEHASAPVMVSAPAAE

SEQ ID NO: 367326 - protein, 212 aa, Zea mays
  Clone ID: MRT4577_98171C.1.pep
MSMSSIIGAADDQATPASSGAAYATPQGETATPSVILASPLPPPQMVVVALDATRDHRDDEIKTAFRNLVERGDILRARDSLLVLGVLHSITHPKGVLVLIGIMAYCVFGCGGSGSCYMSRSPAREADGRACVCAGHGVRARGRIEGVTADSTGKAWLRQIQPGRRDPAKGTADRAGKVAATVNPTGKAATTIDPTKAMKGGRWGGSSRAGA

SEQ ID NO: 367327 - protein, 55 aa, Zea mays
  Clone ID: MRT4577_98172C.1.pep
GVNKQQAPMVRTLGGTPPKAGHKKSGVLPPFTLPPIFEAFKALASTCLGLVKPKP

SEQ ID NO: 367328 - protein, 68 aa, Zea mays
  Clone ID: MRT4577_98173C.1.pep
MALLALLLGLCTAGVTKGTVDDGLEVTGGNGRVTGSPYGQVQTLYINRTSASGLRSYDTYRCLARRTR

SEQ ID NO: 367329 - protein, 76 aa, Zea mays
  Clone ID: MRT4577_98175C.1.pep
ACGKGTELAQAVDDVLFALPANEDRDGPIMHLPTTTFKLPREKDIPKRRAPTKWELRGKAKGITKRKKNKREGNEQ

SEQ ID NO: 367330 - protein, 52 aa, Zea mays
  Clone ID: MRT4577_98176C.1.pep
NNVGVQNIKSLFHVNVHSFFLTFNFFPHFSIRYPEYIFLNVFSLEIKVSLFA

SEQ ID NO: 367331 - protein, 137 aa, Zea mays
  unsure (1)..(137): unsure at all Xaa locations
  Clone ID: MRT4577_98177C.1.pep
ADTHTTGAVHIYRGHHRTKKQXXXKTPTGKXSTXEEEXADTXDNXKAKSQDKEGTPPDQQRRNXXGKQPEDGRTXXDDNXQKESTXHXXHRRRGGXQXXXKTXTGKTNTXEGEAXDTXDNXKAKSQDKEGXPPDQQR

SEQ ID NO: 367332 - protein, 94 aa, Zea mays
  Clone ID: MRT4577_98178C.1.pep
RLAPSTRAATRPCRNPHAPAATICLRHRRDGATASSTDTGNRLSHGARARVQQLHRVHHAALVLPERHPAPARRGSGAPPRARAAASRSAAAFA

SEQ ID NO: 367333 - protein, 48 aa, Zea mays
  unsure (1)..(48): unsure at all Xaa locations
  Clone ID: MRT4577_98179C.1.pep
LLLDLTGHARAIIFCQHRMFLTDPXAPYIYCXEGQIVKCLARASFLTN

SEQ ID NO: 367334 - protein, 93 aa, Zea mays
  Clone ID: MRT4577_9817C.1.pep
TPSKDEKFGSKLAPPPKKKIEGPSNPPSSWLDPPPLPEGAEFFSQIKELESLFTPLFPKMFPGPGPPMGGSGGMAEAPPPGTGGPAPQIEEVV

SEQ ID NO: 367335 - protein, 73 aa, Zea mays
  unsure (1)..(73): unsure at all Xaa locations
  Clone ID: MRT4577_98180C.1.pep
LNNNVHYLLLLYITPLSLFLDTSLXMITLLIPNNTTIPTNNHHVFSTYSHNQPYVFIHLYYVNTTLTLYNNLL

SEQ ID NO: 367336 - protein, 69 aa, Zea mays
  Clone ID: MRT4577_98181C.1.pep
GPEALVSQGVKSHSVERLEGYQPSLFNQQKAHPLWLICERRCEVKLHLEQEAHVNGRVCNFVIVGVFIQ

SEQ ID NO: 367337 - protein, 122 aa, Zea mays
  Clone ID: MRT4577_98182C.1.pep
KQVERMLTEVHEQALVSCDAMHRERRILLKQEIGRMVLFFTDQPSLLAPNIQMVFSALALSQCEVIWYFQHVGIASSKSTRLKTGDIDATDPTIGFLLDGIGKLCCLVRKYIAAIKEYALSY

SEQ ID NO: 367338 - protein, 239 aa, Zea mays
  unsure (1)..(239): unsure at all Xaa locations
  Clone ID: MRT4577_98183C.1.pep
ICYGCASIVNNICYFSKSEILQDLLKETNTPSFLAGLLXRKDWLVLTSSLKIVEILXLQKLPNAYLGFFIKEGVVNAVEALLNQQDCSKSTHMPDNMQQPETQPVIRNKTTCFCYAFDACRSEAAEKRTCRIGKDSLFTFARHVKTTYFTKDVVSSEMGLTEILQKLKNCXVXLNETTDKSSEQCNLQNEEYLSTILSEVMMELHGGETMTTFEFLESGIXVKSLSNYLSNGKYLQEEI

SEQ ID NO: 367339 - protein, 166 aa, Zea mays
  unsure (1)..(166): unsure at all Xaa locations
  Clone ID: MRT4577_98184C.1.pep
AGGRIPTLASXATGKYDLAVASSGDEVTLDTGVDKSRVASTVLDDPPTVILTVDSVLLPHVLFGGAPSPAPAPGPAADVPASAPAPEGSAPAPAPKAAGKRKKKKARSPSHSPPAPPADSPDMAPADAPTEDAADKVESKKNGGAAAAVSFAASVASVALAVAYLL

SEQ ID NO: 367340 - protein, 168 aa, Zea mays
  unsure (1)..(168): unsure at all Xaa locations
  Clone ID: MRT4577_98185C.1.pep
GNVYLVPTTSNSRQLSDMNEHMGRRTVGGLLFTKGGSILLFREDGSRPRAKNFCSRHGCSGHPSVGKAKGKEAHRTAVPNESTPATLRRPKICRNPDRMPPHGSSAPGSISKDAGGSCSETGNRSRDTPGPGRHLLARLKERVNTSRKRSLNREXPPQSPSAFTASSP

SEQ ID NO: 367341 - protein, 140 aa, Zea mays
  Clone ID: MRT4577_98186C.1.pep
SRYEISCLPCARQRQNPRVRGSATMMHASQTLPERLTSADYATCRPLAFRLTWSLSLRSCIKALLLAALMEHRQHQEVRRNRKACCTGRRLDTLSTDNNAFPLLRDDRFPKLDPYSTPRLPLKELHRPSLTSVPPSDCRP

SEQ ID NO: 367342 - protein, 68 aa, Zea mays
  Clone ID: MRT4577_98187C.1.pep
KLTGSCKCPRGRKLTGRGCLQPQPPLGMLEVGPPTKTQKSKATNHHPNGVDRVLLRSEVNKANGLKTR

SEQ ID NO: 367343 - protein, 155 aa, Zea mays
  unsure (1)..(155): unsure at all Xaa locations
  Clone ID: MRT4577_98188C.1.pep
QQVAACALPPHFPSLTPDPHDSITRPALQTLASPXSPFPMRPNPXSRPPTRRTCAPPPPLSPWRPPPPPADPPXPDPGAKKPRLAQPPARDPXLTPLPPPPPMAEQAPPSKRWLTSCSASTGPRLGSSPSIPRPSSPTSPSSLERTSRALRPSPA

SEQ ID NO: 367344 - protein, 53 aa, Zea mays
  unsure (1)..(53): unsure at all Xaa locations
  Clone ID: MRT4577_98189C.1.pep
CFKSVLLIYTFIFWITGVXLLAVGLWGKVSLENYFSLINENGTNVPFVLIATG

SEQ ID NO: 367345 - protein, 49 aa, Zea mays
  Clone ID: MRT4577_9818C.1.pep
KCTQPEYVIYKIHPNWIRKTFHNIMMATQDDTIDKDPSLWDYGNVNWIP

SEQ ID NO: 367346 - protein, 48 aa, Zea mays
  Clone ID: MRT4577_98190C.1.pep
TSIQAPLLCVSNLTEGPRLLSHSRLDLGTSCCSVTNVPAKEKTNAVRS

SEQ ID NO: 367347 - protein, 100 aa, Zea mays
  Clone ID: MRT4577_98191C.1.pep
FRGIGSPFVLIPRWGLRLVASGVYVWVVVDRPVLVLLGGLLPRVCRLAGGWGSPGSCCIGVLFGGEGGCVLNLPPPVGRPVRVKKKGWEGRLYRVHACAG

SEQ ID NO: 367348 - protein, 64 aa, Zea mays
  Clone ID: MRT4577_98192C.1.pep
SVAKIEEKQMVAVVPALETKSSLLVPPVHCKQPCTLIAIGGLSFIVAATLHETFLAAPSKRPPC

SEQ ID NO: 367349 - protein, 45 aa, Zea mays
  Clone ID: MRT4577_98193C.1.pep
SAALVAVGRPGPHGDVVVVTAVDHGAGALPHVGARHADASADAWA

SEQ ID NO: 367350 - protein, 91 aa, Zea mays
  Clone ID: MRT4577_98194C.1.pep
MEPRAKASLSLLRQVRHMALKVAGARSVVSRRVSVSRYSSKLVVDVMCFVCACLCLGAPSSEQDYKRYAPLIARRGGCTACLHRTVWMSCL

SEQ ID NO: 367351 - protein, 123 aa, Zea mays
  Clone ID: MRT4577_98195C.1.pep
TPMGDWDHQSRPGKDFGATRPAIGLSSSSSSHSAGGRRLRRARVILHCTATTAFRSIPPAPRRSRLELAADHQRILYIPIPWLTGASSSLSPAPFAESKDPLSRRKRRRTHFRSQHGRRGGLT

SEQ ID NO: 367352 - protein, 156 aa, Zea mays
  Clone ID: MRT4577_98196C.1.pep
VPRKKMQKPEAKAHRRGLRAPMGGGRGREDGREKRERERERETEKERGKRGKGGTRKETERKKRKRGETRESANGQKKGSTMGGWDPKERGGDTGKNPAARGGGGGGQTHARKGAGKKKEEQGGAKRARQTKLGHYGPRPPCAAEKRNSPRPAGNA

SEQ ID NO: 367353 - protein, 61 aa, Zea mays
  Clone ID: MRT4577_98197C.1.pep
MAPGAQVPSRDPAELRPDSTSPGTLINRAMRKTTQVDPKHGLLHRMMLMDKPEDDRQADVV

SEQ ID NO: 367354 - protein, 94 aa, Zea mays
  Clone ID: MRT4577_98198C.1.pep
MALSKPFLSCLLPLPFRLRPQARFLCLATPPLTPTPTQIDDLPPADAVAERRRRKRLLRVEPPLFRGPPPYCAPGASCPVLYPIAPNIPEPFSV

SEQ ID NO: 367355 - protein, 85 aa, Zea mays
  Clone ID: MRT4577_98199C.1.pep
MGKEAWLRHAEKLRSEDRALRRYGGSTARELRGEGELGWEEWKTTRLSEGEDQWLQTNNLSDGKRRQQVRRLEIFLQVRAAQTRG

SEQ ID NO: 367356 - protein, 43 aa, Zea mays
  Clone ID: MRT4577_9819C.1.pep
VPPWLTNLFVDWIGCTTARARLKFPSGVEESGTTREGCASCRI

SEQ ID NO: 367357 - protein, 209 aa, Zea mays
  unsure (1)..(209): unsure at all Xaa locations
  Clone ID: MRT4577_981C.1.pep
ANGSLGDVLXXSEKRHILDWPMRYKIAVNAAEGLSYLHHDCKPVIVHRDVKSNNILLDAEYGAKIADFGVARTIGDGPATMSMIAGSCGYIAPEYAYTLHVTEKSDIYSFGVVILELVTGKKPLAAEIGEMDLVAWVTAKVEQYGLESVLDQNLDEQFKDEMCMVLKIGLLCVSNLPTKRPSMRSVVMLLLEVKEENKPKLKAVATLPI

SEQ ID NO: 367358 - protein, 50 aa, Zea mays
  Clone ID: MRT4577_98200C.1.pep
RAKVFRALVWSNHRVRGFLQHSQRLTGTNMLKCRRANKEMKVQEAIPQGT

SEQ ID NO: 367359 - protein, 47 aa, Zea mays
  Clone ID: MRT4577_98201C.1.pep
TCSAVLERRLFLSSYDPIRMMVWPTGEISIKKKNIYDKPPSKKSSSV

SEQ ID NO: 367360 - protein, 123 aa, Zea mays
  unsure (1)..(123): unsure at all Xaa locations
  Clone ID: MRT4577_98202C.1.pep
TLTGHHSRCDAICARSRSYFAPQLYQRDAVIGHGVVAPQMADKPWLSTVTPQNDTLRQTPRSRSSGARASSSRGWHSLPPGSCVGGGGGGASTAASCPVAYGEFGVRVRVVEARWQRRVTXRP

SEQ ID NO: 367361 - protein, 64 aa, Zea mays
  Clone ID: MRT4577_98203C.1.pep
NWIRLTANAEGHLHTRRSTATRTMDRTVLTDASRSKLDHHSGVSCTDVVIDNDTCLYRPMDLKI

SEQ ID NO: 367362 - protein, 178 aa, Zea mays
  unsure (1)..(178): unsure at all Xaa locations
  Clone ID: MRT4577_98204C.1.pep
MPTTICSLSKQHKWKIAVSVMLFSVLLIACDSPFRAFFSKYLSSIVPSSGSSHDTALTQDKAAKQIEHGMYNMNTSSTNAASSWSIMKEEFIFQAHDRPFNNCHASTIVEVEKEIFLVSYFGGSIEGAPDVKIWTQRYSDGYWHPPVVADEEXATAMWNPVLFQLPSHELLLFYKIGD

SEQ ID NO: 367363 - protein, 171 aa, Zea mays
  Clone ID: MRT4577_98205C.1.pep
MKLKGVSAFRKKSEERTSGGSGSGGGAKIAPLIDEEAVGDFFVEVYGGPRVSSDMSCSDMSLDEMDATVRRMEFVVFDRCGADEDGEKGKDLAFCDDGEPEPRPVLQQKHGAFGDSLSECSGVHIDNDFVEELPWMKYHGYEYDDSLDDEILEEQRIGEQEVVGAEFSVEQ

SEQ ID NO: 367364 - protein, 328 aa, Zea mays
  Clone ID: MRT4577_98206C.1.pep
MYNMNTSSINAASSWSIMKEEFTFQAHDRPFNNCHASTIVEVEKEIFLVSYFGGSIEGAPDVKIWTQRYSDGYWHPPVVADEENATAMWNPVLFQLPSHELLLFYKIGEHPQNWSGAMKRSLNGGMSWLEREQLPPGILGPIKNKPFLLDDGRLLCGTSVESWNSWGAWLEVTEDAGRTWSKYGPIFIQGEKLGVIQPVPYQTTNGSIRMLLRSHQTIGSVCMADSYDGGLRWSFARKSVLPNPNSGIDGIKMKDGRVALAYNTVSRGTLKVAVSTDDGLSWQEVVTLENAEGWEFSYPAVIQTMDGLVHVTYTYNRTQIKHVVLRPS

SEQ ID NO: 367365 - protein, 99 aa, Zea mays
  Clone ID: MRT4577_98207C.1.pep
PEAVACCSLCTGAAGTRVEARADVAGARGRLCTGLSLIVHVDKGRGSIKVQQRNRDSAAANRASRLAILHFCKYPAKNTTPFLRKSKQNNKKLQTSMSF

SEQ ID NO: 367366 - protein, 206 aa, Zea mays
  unsure (1)..(206): unsure at all Xaa locations
  Clone ID: MRT4577_98208C.1.pep
AKKKNKKKKKKKKNKKKKKKKKKKKKKKKKKKRALDWFFGGGFGGGNGGIFGGRFFGGDAPNFDGLGIGFPIFSCFGFAMPFILWARICWGLPWIIFGRGFKKKTNNTRGAXPKNLKXLPTFKFKIKKRRHGSGRETEGQEGGILAGGTDKGRSLFGENPIWCICFAKYAHNDELRELPWAHWFXKDWGEKGLKKNALCPLGKFEK

SEQ ID NO: 367367 - protein, 65 aa, Zea mays
  Clone ID: MRT4577_98209C.1.pep
IPLYPPCYPPSSPLPITFPNLFATCYGHWTPPLSGAFFVGFVTFTSSLTNPLATGFFPFFSPFFL

SEQ ID NO: 367368 - protein, 121 aa, Zea mays
  Clone ID: MRT4577_9820C.1.pep
MLRQSSSRNQRSKGLKLKKALQISLLLLVSVWLLYQVKHSYEKKAYSEDEVSGSHKDDKDQGETVRLGRKDLPPKMEADSSTLDERVEDEENDEMEQEMKHDENDDDPIDEQDLEKNGGSS

SEQ ID NO: 367369 - protein, 90 aa, Zea mays
  Clone ID: MRT4577_98210C.1.pep
RRMHLITLLLTSFRNQHHSTLLLNTLTLTLSPTMRRRIKLLKRDTKLLTRSRIHPLLTLTRHQTRIILSLLHLHHLTTLHHSLLLYLHCL

SEQ ID NO: 367370 - protein, 92 aa, Zea mays
  Clone ID: MRT4577_98211C.1.pep
GGGIGAVSTGPVGEGEPGAVVAALGVSHAAVAAGREENLELEPPEEQRDRVRAVAVHEARPSSLCVGPMDGLGSTQATRGRGRGVACSSGYS

SEQ ID NO: 367371 - protein, 103 aa, Zea mays
  unsure (1)..(103): unsure at all Xaa locations
  Clone ID: MRT4577_98212C.1.pep
PRVRSQSYNTTRNLCQAGTVKRIREVNFKVTRQPPLSREFAREEQXTGMRQPETASHYPPGLEDTRMLTMTGIPAGTHNTGQAASLHSPSECSAIISFRTVAF

SEQ ID NO: 367372 - protein, 156 aa, Zea mays
  unsure (1)..(156): unsure at all Xaa locations
  Clone ID: MRT4577_98213C.1.pep
XCRASGPPPLVVLAXPQVXXFAGLPGFHGPRHAGPYXXAVPFSGEPXRPVARRTGAGAPILRRPHXXMSXTSNXRPNDXXTXXIRFKPPFKGVXNRVTREDEXPSLTHDPDXXSXLRXDXRPVXXSWAARLSAGAWSWRRTEPSPRTPRREHSPSW

SEQ ID NO: 367373 - protein, 39 aa, Zea mays
  unsure (1)..(39): unsure at all Xaa locations
  Clone ID: MRT4577_98214C.1.pep
FXALFHASVTVGSVRSYRGHTYKFVPLHTTQEHYDGFIL

SEQ ID NO: 367374 - protein, 185 aa, Zea mays
  unsure (1)..(185): unsure at all Xaa locations
  Clone ID: MRT4577_98215C.1.pep
YLCLQXHFVGDDWKVHRVIIKFGMFWSSPTXFGXIIHCKEASVPESESGSYNVMWDAIRDWNLDQKILSLTSVGDVRNNADTVKLKEMLIEKKCLPIRGKLYNIACLVYILNSVVSAGQADILRFVGDAVMEFFVAHASSPSAQQQLLEVISQMSLKCPQEDAKWWHKFYFRLEVLLHFKKSFPS

SEQ ID NO: 367375 - protein, 135 aa, Zea mays
  Clone ID: MRT4577_98216C.1.pep
MKIVVVLFVLVLALIAGAAADKKEKEDTCKNLCAEKKLKEPACKESCALNKRFKKVWIEAVQCSLKCNKKHGFGTPDSKSCEEGCKKKYEDKVAEITASCHTVCTKVEKEQLAIEECKKICTPSLIFKEIKEALH

SEQ ID NO: 367376 - protein, 107 aa, Zea mays
  unsure (1)..(107): unsure at all Xaa locations
  Clone ID: MRT4577_98217C.1.pep
MRVVATRTGAAGAAHAASAFLLLLELLGCAYIAIGGAAMAGHVLPELKENPDTANSAXTDMVGQFFRSGHKMREKRLHEYCRVVEAKEQVVYXTLHQLTLEDGSAGR

SEQ ID NO: 367377 - protein, 118 aa, Zea mays
  Clone ID: MRT4577_98218C.1.pep
TNYIQSGRRSMTYLYWYMVKAPLCFIRLQEKLHSSEKESFTNHCASSQIIHNMPWIYELTDRHGTCQRSLHCHWGAIGHRRIICRRPYCAIVQKLTGFTMVHRHSTAHITSLIYARLR

SEQ ID NO: 367378 - protein, 86 aa, Zea mays
  Clone ID: MRT4577_98219C.1.pep
MAFLFVRVSMVLILLAVTAASSAAALTPPPSSATDLDALLAFKAMLKDPLGILASKWNAAASLCSCAGVSCDRRQRVTGFEFRDVP

SEQ ID NO: 367379 - protein, 52 aa, Zea mays
  Clone ID: MRT4577_9821C.1.pep
KLSRITSFQGISHKKARQIGNSLKLIDKVQCLPQLDYSLSPLQKESLRMSES

SEQ ID NO: 367380 - protein, 79 aa, Zea mays
  Clone ID: MRT4577_98220C.1.pep
SLIPILPFFLFPNILLSPPINFLRNQIHPLYSFPISYKNYIPLNSFYFPFQLNQIISYYTNNFLLFLLINLTTLFPIIY

SEQ ID NO: 367381 - protein, 123 aa, Zea mays
  Clone ID: MRT4577_98221C.1.pep
EIRQRMGEDLDTLEFDELRGLEQNVDAALKEVRHRKYHVIATQTETYKKKVKHSYEAYKNLQQELGMREDPAFGFVDNTGAGGWDGAAAALGGGAPDMYAFRVVPSQPNLHGMAYGSHDLRLG

SEQ ID NO: 367382 - protein, 83 aa, Zea mays
  Clone ID: MRT4577_98222C.1.pep
DGCYCPEKIHPSSYPYDVFGRADKQGPLERLLAAGRETAQLRHLWSQRSTVRARRRAPPDDGALAGPPPLLHGDSERRVSRTS

SEQ ID NO: 367383 - protein, 127 aa, Zea mays
  Clone ID: MRT4577_98223C.1.pep
NGSNIGNHGLIFQLKLNRTVAQKGEGVKLIISRKIFTQGGLATLPILIQFRTIISWEGRALRHIISRFRTLLGLFNREYFPWVLKSLMAAQKRPPFDSVKQILNLKSLRFLKLRLQPLGAGGITPLA

SEQ ID NO: 367384 - protein, 57 aa, Zea mays
  Clone ID: MRT4577_98224C.1.pep
HHNSCICAAIKLSFLGQAIFFYWVTSNFFSLVYGAGMSLSRLYLRFMVSVYLMIYVP

SEQ ID NO: 367385 - protein, 27 aa, Zea mays
  Clone ID: MRT4577_98225C.1.pep
ATYLIDTNTPHRKHNLPCTGVDNYQVL

SEQ ID NO: 367386 - protein, 57 aa, Zea mays
  Clone ID: MRT4577_98226C.1.pep
SASSRPMHEPACTADRWVADTPVRLYSKLNPKEKNGAYWRSRLDKAFHRLMIPPKES

SEQ ID NO: 367387 - protein, 106 aa, Zea mays
  Clone ID: MRT4577_98227C.1.pep
ETPFNPKIGFQLFGTNMVAENPVGSPGAVPAGEKFAQNLFPPKNSKSPPPGPRFPFNLTLPAGAKKNSSLFWGNQKKRPPKGHQSFPVFFALNEIVISWEQTPGGL

SEQ ID NO: 367388 - protein, 67 aa, Zea mays
  Clone ID: MRT4577_98228C.1.pep
NSTVFCEKKKKKKKKKKKKKKKKKKKKKKKKKKKKKKKNNITKKIKKKKTKNNKYKNSTNIIDYTNL

SEQ ID NO: 367389 - protein, 162 aa, Zea mays
  unsure (1)..(162): unsure at all Xaa locations
  Clone ID: MRT4577_98229C.1.pep
MLADLLVLPCKSSSVLAQQXVDQLDIMQPHKLMDQKVPFSLDDKLFGXVKLPPSSWREDQDPANQLDSFPSXIGFTSRGRGGSVMXAQYESGLFSSSLPEFFDKKIRLTPKNRVVGHLVGKVNHADDEPFELTKEIEAQIIGNLLPDDDDLLTSVCGDIGYN

SEQ ID NO: 367390 - protein, 45 aa, Zea mays
  Clone ID: MRT4577_9822C.1.pep
IILSQRWKHIQTRNMQPSSSTVKSQCQIFFLPLQMKSSDLIPNYL

SEQ ID NO: 367391 - protein, 175 aa, Zea mays
  unsure (1)..(175): unsure at all Xaa locations
  Clone ID: MRT4577_98230C.1.pep
DNALRAXCLIALLCTVLGEKVXWKDDDSKANWCSGCFKITKLGAFGNVKTDSTKAMQEVCAXNCGGTGKQNILIPKGDFLVRPLNCTGLCRGDVTLHVNGTLLAISDLSQFKDHGYWIEILLMDNLDMIVKGKLDWHGLGVWNKNSCLQNCDCKILPQXLVMYSVDNGEVXRITL

SEQ ID NO: 367392 - protein, 111 aa, Zea mays
  unsure (1)..(111): unsure at all Xaa locations
  Clone ID: MRT4577_98232C.1.pep
AAAFHHKNTPCPKLASAAAXPTTPSNLXHCNRQLSPPIPQDRQGPLPLLNMTRQLFRAAAATPRPAMAHARILPSSPNXPSAXDLPSKQTAPTLPYFPTTPSIKSPSHHPR

SEQ ID NO: 367393 - protein, 85 aa, Zea mays
  unsure (1)..(85): unsure at all Xaa locations
  Clone ID: MRT4577_98233C.1.pep
MVLARVDKANVXADWGDVSAHVASIVREALEMLCLSYASTKKDVADLDLTQGSVHVKGHWHNVAYAMSRAVAHVDDMHIALCDLC

SEQ ID NO: 367394 - protein, 64 aa, Zea mays
  Clone ID: MRT4577_98234C.1.pep
GIQGLNKVYEHESVLNKWWSINNINIMLSQVVILFYCGWCLEPVGWAFLYKYIRSLVCLLRVVI

SEQ ID NO: 367395 - protein, 898 aa, Zea mays
  unsure (1)..(898): unsure at all Xaa locations
  Clone ID: MRT4577_98235C.1.pep
MPPAPPQGIPADEGDPNGDRDDAGGSPSHSTELSEEPEPEGWIARPITRDTARGCHFHDTLDTLYGRAFDRHTWSIEYRCVVYQHRRGLYLDQWEATCLVRRPDDDLRGAEAFSEHYSITERDIAEAAMQDAARCALSQYCSLFSGVADSLDLKYYPRRSTGSAGGVIVSPIGEGNPRLNSLVNLATVLNTELDHALDESGKVRAEVAELRAECAARHYLDGGSPATVGIQHPYRSQPRGRFDYVRVRLLIICWNACHDEHMSENMHRGARRAQPEQQAPQEDAAQQQQLPPPPPMTIEQMFLMQTQAVQAIGQTLAAMQQVQQQPPPPQPPVQIQMPQVPRDKHAEFMRGHPPVFAHSVDPMDAEEWLRSMEPITWEEFKDNFCRYHVPEGLMIMRKEEFLALKQGPLSVSEYRDKFLQLSRYAPEDVNTDAKRQYRFLRGLVDPLHYQLMNHTFPTFHHLIDRAIXLKGSVGRWRTGNTRLVDLRSGVXPSPLLRQLTSTIXQDVILGMNWLTKYQASLSCDKRTVKLVSLSGEEVLVELXCLDQGKEAVTKSPSILRRLXPSEAINVVSEFPDVFPEELPKPIPGTAPISKRAYRLSGPELVELKKQIDELLEKGYIRPSTSPWAAPMLFVEKKDGTKRMCIDYRSLNEVTIKNKYPLPRIEDLFDQLRGASVFSKIDLRSGYHQLRSRPSDIPKTTFITKYGRYEFMFMSFGLTNALAYFMYLMNSVFMDYLDKFVVEGRVVAYSSRQLKIHEKNYPTHDLELAAVVHALKTWRHYLYGQKCDIYTDHKSLKYIFTQSELNMRQRRWLELIKDYELEIHYHPGKANVVADALSRKSQVNMLPAHPMSYELVKEFDRLSLGFLNNTQGVTIELEPTLEQDIRKGQRYDEKINEIR

SEQ ID NO: 367396 - protein, 754 aa, Zea mays
  Clone ID: MRT4577_98236C.1.pep
MPPAPPQGIPAAGGDPDGDGADDAGGSSSHDTELSEEPEPEGWIARPITLYQHRRGLYPDQWEAISLVRRPDDDLRGAEAFSEHYSITERDTAEAAMQDAARRALSQYCSLFSGVADGLDLKYYPRRSTGSAGGVIVSPVGEGNPKMNNMVNLVAMLNTELDHALDELGKMSENRRRGARRAQPEQQAPQEEVAPWQHLPPPPPMTIEQMFLMQTQAIQTIGQTLTAMQQAQRQPSPPQPPVQVQMPQVPRDKRAEFMRGHAPVFAHSADPMDAEDWLRTVEHELHTAQCNDREEHLIDRAIMTERKRREMEDRKRKIGGPLVGSRSCPCYSGNPPQQFKKGHWANHCPKKADQQQPAPNASVRQNAMQQGGNNRGQPRAQYGKVNHLEADTVQETRGVALRTFSVEYHFLNVLFDTGATHSFVTASWVESHNIPVAPMYPPIRVSSVGGRTQTNRFCPSAKVQIRGIEFPADLIVMSNQDTTIDVILGMNWLTKYQASLSCDKRTVKLVSLSGEEVLVELVLSGPRKWSCHQVTAHIEEIKPSEAISVVSDFPDVFPEELPDLFDQLRRASVFSKIDLRSGYHQLRIRPSDIPKTAFITKYGLYEFTVMSFSLTNALANFMYLMNSVFMDYLDKFVVVFIDDILIYSQNEKEHEEHLRKVLQRLRDCQLYAKLSKCEFWISEVLFLGHIINQEGLAVDPKKVTTILDWKAPKDVRGIKSFIRMAGYYQRFIEGFSKIARPMTAVGDLFSNAKN

SEQ ID NO: 367397 - protein, 429 aa, Zea mays
  unsure (1)..(429): unsure at all Xaa locations
  Clone ID: MRT4577_98237C.1.pep
MDAEDWLRTVERELHTAQCNDREKVLYGPRQLRGTVQSSWESYLATHANPESITWEEFRDNFRRYHVPEGLMIVRKEEFLALKQGPLSVSEYRDKFLQLSRYVPEDVNTSKRQQSTSXPFKQGHQHQHQHQHQNQQQQCQRQFPQXSSSSTVRXNKQGGNQYQRQGNQAARLLAPATNQNNQAAPAQGGSRACFHCGEQGHWANHCPKKVAQKXASSQCPSQTECNAARRQQPWATSCPVWKGEPLGVRHSPEDSRSGTRRRSVMELVLSGPRKGSCHQVTAHIEEIKPSEAINVVSEFPDVFPEELLGMPPERKVEFAIELIPGTTPISKRDYRVSGPELVELKKQIDELSEKGYIRPSTSPWAAPVLFVEKDGTKRMCIDYRSLNEVTIKNKYPLPRIEDLFDQLRGASLFSKIETRAMVGAPGFSI

SEQ ID NO: 367398 - protein, 736 aa, Zea mays
  unsure (1)..(736): unsure at all Xaa locations
  Clone ID: MRT4577_98238C.1.pep
MTIEQMFLMQTQVVQAIGQTLAAMQQVQQQPPPPQPQVQVQMPQVPRDKRAEFMRGHPPVFAHSADPMDAEDWLHIVERELHTAQCNDHEKVLYEDVNTDAKRQYRFLRGLVDPLHYQLMNHTFPTFQHLIDRAIMTERKRREMENRKHKIGGSQVGSSSRPRYSGNPPQPFKQAXSNQASRLPTPATNQNNQPAQGGSRACFHYGEQGHWANHCPKKAARQQPTPNXSQTKYNAARRQQPWAAXAQYGKVNHLEADTVLETPGLALATHSFVTASCIQXMYPPMRVSSVGGRTQTDRFCPSARVQIRGIEFPADLIVMGNQDTTIDVIQGTNWLTKYQASLSCDKRTVKLVSLSGEEVLVELVLSGPRKGSCHQVTTHIEEIKPSEAINVVSEFPDVFPEELPELMPDTAPISKRAYRVSGPELVELKKQIDELSEKGYIRPSTSPWAAPVLFVEKKDGTKRMCIDYRALNEVTIKNKYPLPRIEDLFDQLRGASVLSKIDLRSGYHQLRIRPSYIPKAAFITKYGMYEFTVMSFGLMNAPTYFMYLMNSVFMDYLDKFVVIEQEHEEHLRKEGRVVAYSSRQLKIHEKNYPTHDLELAAVVHALKTWRHYLYGQKCDIYTDHKSLKYIFTQSELNMTQRRWLELIKDYELEIHYHPGKANVVADALSKKSQVNMLAAYPMPYELAKEFDRLSLGFLNNMKGKCALGPFLSILVIECQHKCLTVNQRPWMNKVQI

SEQ ID NO: 367399 - protein, 155 aa, Zea mays
  Clone ID: MRT4577_98239C.1.pep
MDNGDRSGAGAGAVGSAGSLGLRVGQAVFSSASLLFMSVGVEFFSYTAFCFLVTIMGLVIPWSCTLAMIDVYSVFVGCPLRVPGVMVIVVALSIVSFAGACSSAAVIDLLLQLHGSHSSPTFCGRYQLSAMMAFLSWLLMAASATFNLWFVASRW

SEQ ID NO: 367400 - protein, 65 aa, Zea mays
  Clone ID: MRT4577_9823C.1.pep
WLSSSLVDVHVIGGQQTVRVMAISTATYLAAAAAVADEDGWVHRVAVEASGGQVDLVLRLGVRHG

SEQ ID NO: 367401 - protein, 63 aa, Zea mays
  Clone ID: MRT4577_98240C.1.pep
TQLHVHIYSINILLYPSINRDNTRTKKLPPAISLVLFVSRVLSDRLIPNNSLGFELSLGSSHR

SEQ ID NO: 367402 - protein, 511 aa, Zea mays
  unsure (1)..(511): unsure at all Xaa locations
  Clone ID: MRT4577_98241C.1.pep
YQRQSNRAARLPVPATNQNNQAAPAQGGSRACFHCGEQGHWENHCPKKAAQQQPASNAPARQNAMQQGGNNRGQPRAQYGKVNHLEADTVQETPGVALGTFLVDYHSTNVLFDTGAKHSFVTASWVESHNISVAPMYPPMRVSSVGGRTQTNRFCPSAKVQIRGIEFPADLIVMGNQDTTIDVILGMNWLTKYQASLSYDKRTMKLVSLLGEEVLVELVLSGPREGSCHQVTAHIEEIKPSEAINVVSEFPDVFPEELPGMPPERKVEFAIELIPGTAPISKRAYRVSGPELVELKKQIDELSEKGYIRPSTSPWAAPVLFVEKKDGMKRMCIDYRSLNEVTIKNKYPXPKIEDLFDQWRGPKXQEHEEHLRKLSKCEFWISEVIFLGHIINREGLAIDPKKVIAILDWKAPKDVQGIKSFIGMAGYYRRFIEGFSKIARPMATLLAKKVEFKWTPACQKSFKTLKEKLTMTPVLILPDVHKPFSVYCDASYTGLGCVLMQEGRVVAYSSR

SEQ ID NO: 367403 - protein, 179 aa, Zea mays
  unsure (1)..(179): unsure at all Xaa locations
  Clone ID: MRT4577_98242C.1.pep
GHTQRGATAASTKGHQQGQPKAXAATATXXPQGPQPQPXXHXPPKXTPAPXXPQTKHQRQPHRGQQATAARQEPTGPRSRQQTXATXQQPTTXRPKAENTRAQQPQPKQQGTTXATXQQQKXRPXNQATAXNPKQPTQQQQPPXSQPTTTPPQQXRPXNHPAAXXXQPTGSEPTTATTT

SEQ ID NO: 367404 - protein, 1059 aa, Zea mays
  Clone ID: MRT4577_98243C.1.pep
MPPAPPQGIPAAGGDPDGDGDDDDASGSSSNGMELSKEPEPEGWIARPITSDTARGCHFHDALDTLLHRAFDRHTWSIEYCCVVYQHRRGLYSDQWEATCLVRRPDDDLWGAEAFSEHYSITKRDTVEAAMQDAARHALSQYCSLFSGVADGLDLKYYPRRSTGSAGELDHARDELGKMYENRRRGARPQPEQQAPQEEAAPQQHLPPPPPMTIEQMFLMQTQAVQAIDRVIMIERKRREMEDMKRKIGGPQVGGSSHPRYLGNPPQPFKQESHNIPVAPMYPPMRVSSVGGRTQTDNFFPSVKVQIRGIEFPTDLIVMGNQDTTIDVILGMNRLTKYQASLSCDKRTVKLVSLSREEVLVELFLSGPRKGSCHQVTAYIEEIKPSEAINVVLEFPDVFPEELPGMPPERKVEFAIELIPGTAPISKRAYRVSGPELVELKNQIDELSEKGYIRPSTLPWTAPVLFVEKKDGKKRMCIDYRSLNEVTIKNKYPLPRIEDLFDQLRGASVFSKIDLRSGYHQLRIRPSDIPKTTFIKKYGLYEFTVMSFGLTNAPAYFMYLMNNVFMDYLDKFVVVFIDDILIYSQNEKEHEENLRKAQGAACVKLRLCPLQSITIITQNIMGLKVNSSLSRIFGYEAYPQQLRDCQLYVKLSKCEFWINEVMFLGQIINREGLAVDLKKEGRVVAYSSRQLKIHEKNYPTHDLELAVVVHALKTWRHYLFGQKCDIYTDHKSLKYIFTQSELNMRQQRWLELIKDFELEIHYHPGKANVVADALSRKSQVNMLATYPMSYELAKEFDRFSLEFLNNTQGVTIELEPTLEQDIRKGQKDDEKINEIRQLIIDGKGKDFREDAEGVVWFKDRLCVPDIKLIWELILKKAHETAYSIHPGSEKMYQDLNKRFWWYGMKREIAERRELSFEVGDYVYLKVSPIRGTKRFGVKGKLAPLYIGPYQIQARRGEVAYQLSLPENLSAVHDVFHVSQLKKCLRVPEEQFPAEYLEVQEDLTYIEKPTQILETADQVTRRSTIRMCKVKWGHHSEEEATWEREDNLKAKYPELFSSQP

SEQ ID NO: 367405 - protein, 168 aa, Zea mays
  Clone ID: MRT4577_98244C.1.pep
MVKGALQDAAADAAAAPHYYSYSSSAASTMAADGATPPCSYGDASSGVSSPETAGNTDDLCYGVAHDDDVDMVAGDADLAALADIESFFRSPKCMEYAMMDPCSTFFAPAPMATDAASEWEWGRKARSTSGASRPSTDRSIISSSPPDISSEVKPASSGHHSSQLNAD

SEQ ID NO: 367406 - protein, 64 aa, Zea mays
  Clone ID: MRT4577_98245C.1.pep
VYLWTNNPSTSLGMLRGAVCAVLLLNSHVCLWRAWKGLSRPTVVASCTGFSFLRHWIASCYFMT

SEQ ID NO: 367407 - protein, 89 aa, Zea mays
  Clone ID: MRT4577_98246C.1.pep
MPNIQQCLDAGKGEAQGEYQAEHAEHSVKDTAESADVSAHLQKDRPTDTAEQVEHTVQGVKDSVKDTVAGAANTVTNTVAGVTDTVTKP

SEQ ID NO: 367408 - protein, 65 aa, Zea mays
  Clone ID: MRT4577_98247C.1.pep
YFPAIPISYASSLHLKYHSRGSSSMSASLDHKTSFITWMHAAMTPMDPYSASIYFCYIEHNHTMN

SEQ ID NO: 367409 - protein, 33 aa, Zea mays
  Clone ID: MRT4577_98248C.1.pep
TNRMWRKTRSHTGCSLCIGVDPKRYWDADFGLS

SEQ ID NO: 367410 - protein, 102 aa, Zea mays
  Clone ID: MRT4577_98249C.1.pep
GWVIPVPLIFVGVASTAAGDLGDAASARMKSATAVRPFVSKEQMVATSSRRGAGKGRVLSPAVSMEEAVDILGMVLRWLPRACLGCPTSDNGYIDRGFRVLE

SEQ ID NO: 367411 - protein, 68 aa, Zea mays
  Clone ID: MRT4577_9824C.1.pep
GQPGEPTLSEQDPKGPPVVRGPMATPKQGWNALKTPDLGKQNVRPPLGRLKNPFLQGLKMLPPGRGDL

SEQ ID NO: 367412 - protein, 98 aa, Zea mays
  unsure (1)..(98): unsure at all Xaa locations
  Clone ID: MRT4577_98250C.1.pep
MATANGNRKGSFEVPKVDVRFTKLFIDGKFXVNTDSGKTCETRDPRTGXVIAIIAEGGKADVDLIVKAVREAFDNCPWPRMTGYKRCPILHRFADLID

SEQ ID NO: 367413 - protein, 1674 aa, Zea mays
  unsure (1)..(1674): unsure at all Xaa locations
  Clone ID: MRT4577_98251C.1.pep
MDPKEKGMVVNDNEKESIFNEPKDDKANDSGSSQKKKDGKKKRCIKKIVYYDSDESSSSQKDDEYEEKNKTVNSNFSFDYSRIPHNSNAHMLSIPLGKPPHFDGEDYGFWSHKMRSHLFSLHPSMWEIVENGMQFDSSDNSMFINEQIHKNAQATTVLLASLCREEYNKVSGLDNAKQIWDTLKISHEGNNATMLTKMELVEGELGRFAMIRGEEPTQTYNRLKTLVNKIRSYGSTRWTDHDVIRLMLRSFTVLDPHLVNSIRENPRYIKMTPEEILGKFVSGRMMIKEARYVDEALNGPMPIYEPQKVALKATSSRETLPSKVAQVEVAGLNEDEMALIIKRFKTALKGRKEHPNKSKTKGKRSCFKCGKIGHFIANCPDNDSDQEQGKNGKRENKKVYKKAKGEAHLGKEWDSPPRPSTNRLSSQTSITPASWQRRKRCKNFNVDACSEHLISISKLNDEVASLNAQLKTSKDDFDKLKFARDAYTIGRHPSIKDGLGFKREAKNLTSQGAPIFNKEKGKAPMTSNSQNNYAFIYNRKFSRNAYHNRSCNAYDSNAMIASSSSFVHGRDMPKKNVIHHMPRRNVVHVPRIASNCNTQIVRAVNNLPFEARLMRSCSNPPPRSAPMTETNQGIKTPIDPAATLEPPSSKPGRVSGCPIGISGTSREIRCMGSDQLRGKWVTRLVGKDAQPLQSVKLVYASGGSSWIIDSGCTNHMTGEKKMFTSYVKNKDSQDSIIFGDGNQGKVKGLGKIAISSEHSISNVFLVESLGYNLLSVSQLCNMGYNCLFTNVDVSVFRRSDGSLAFKGVLDNKLYLVDFAKEEAGLDACLIAKTSMGWLWHRRLAHVGMKNLHKLLKGEHVLGLTNVTFEKDRPCAACQAGKQVGSAHHNKNVMTTSRPLELLHMDLFGPVAYLSIGGSKYGLVIVDDFSRFTWVFFLQDKSEIQGTLKRFLRRAQNGFELKVKKIRSDSGXRKNRTLIDMARTMLGEFKTPERFWSKAVNTXCHAINRVYLHRLLKKTSYELLTGNKPNVSYFRVFGSKCYILVKKGRNSKFAPKVVEGFLLGYDSNTKAYRVFNKSSGLVEVSSDVVFDETNGSPREQVDLDDVDEEDVPTTAIRTMAIGDVRPQEQKEQDQPSSSTMVHPPTQDDEQVHQEEACDQGGAQDDHVMEEEAPQAPPTQVRATIQRNHPANQILGDISKGVTTRSRLANFCEHYSFVSSIEPFKVEEALLDPDWVLAMQEELNNFKRNEVWTLVPHPKQNVVGTKWVFRNKQDEHGVVTRNKARLVAKGYAQVAGLDFEETFAPVARLESIRILLAYAAHHSFRLFQMDVKSAFLNGPIKEEVYVEQPPGFADERYPDHVCKLSKALYGLNQAPRAWYECLRDFLIANAFKVGKADPTLFTKTCDGDLFVCQIYVDDIIFGSTNQKSCEEFSRVMTQKFEMSMMGELNYFLGFQVKQLKDGTFISQTKYTQDLIKRFGMKDAKPAKTPMGTDRHVDLNKGVATPCFGIWYPKGSTFDLIGYSDSDYAGCKVDRKSTSGTCQFLGRSLVSWSSKKQTSVALSTAEAEYVAAGQCCAQLLWMRQTLRDFGYNLSKVPLLCDNESAIRMTDNPVEHSRTKHIDIRHHFLRDHQQKGDIEVFYVSTENQLADIFTKPLDESTFCRLRSELNVLDSRNLD

SEQ ID NO: 367414 - protein, 612 aa, Zea mays
  Clone ID: MRT4577_98252C.1.pep
MAIGDVRPQEQKEQDQPSSSTMVHPPTQDDEQVHQEEACDQGGAQDDHEMEEEAQPTPPTQVRATIQRDHPVDQILGDISKGVTTRSRLVNFCEHYSFVSSIEPFRVEEALLDPDWVLAMEEELNNFKRNEVWTLVPRPKQNVVGTKWVFHNKQNKHGVVTRNKARLVAKGYAQVAGLDFEETFAPVARLESIRILLAYAAHHSFRLFQMDVKSAFLNGPIKEEVYVEQPPGFEDERYPDHVCKLSKALYGLKQAPRAWYECLRDFLIANAFKVGKADPTLFTKTCAGDLFVCQIYVDDIIFGSTNQKSCEEFSRVMTQKFEMSMMGELNYFLGFQVKQLKDGTFISQTKYTQDLLKRFGMKDAKPAKTPMGTVGHIDLNKGGKSVDQKAYQSMIGSLLYLCASRPDIMLSVCMCARFQSDPRECHLVAVKRILRYLVAMPCFGIWYPKGSTFDLIGYSDSDYAGCKVDRKSTSGTCQFLGRSLVSWSSKKQTSVALSTTEAEYVAAGQCCAQLLWMRQTLRDFGYNLSKVPLLCDNESAIRMADNPVEYSRTKHIDIRHHFLRDHQQKGDIEVFYVSTENQQADIFTKPLDESTFCRLRSELNVLDSRNLD

SEQ ID NO: 367415 - protein, 103 aa, Zea mays
  Clone ID: MRT4577_98253C.1.pep
KKKPGKPLQPHYSQNVPGGGGPHGRLPRQGKEPPPWKRGPRPQKKRGGQNGWGQTRGFPQGAGWPRPGPNNGGRPGGTPLKPFVGEQKNRGPRFKKNGILVRF

SEQ ID NO: 367416 - protein, 107 aa, Zea mays
  unsure (1)..(107): unsure at all Xaa locations
  Clone ID: MRT4577_98254C.1.pep
MATRIVSLDMLRALPTCVANATDYRQCSQAPIASLLYLYYXSIIAAVCEHPAXLQPYXRIXQAITLGNIPXRPRXFQQSPALSLEQSLVQTIIVQQLXQLVLTEINQ

SEQ ID NO: 367417 - protein, 76 aa, Zea mays
  Clone ID: MRT4577_98255C.1.pep
QTNLEIISGTNRLASNNSLPTAMYRAVVRVYLFSTCLVIRESCFHSPSSVSSTFTHRVRSSTTQAGRVHQNPTCTR

SEQ ID NO: 367418 - protein, 61 aa, Zea mays
  Clone ID: MRT4577_98256C.1.pep
ARLLQTLRKAYQNSEGPLKDKSNIRSLESVKGLRGFIISFDHCSAGLAGGCDSLSKYLNVL

SEQ ID NO: 367419 - protein, 326 aa, Zea mays
  unsure (1)..(326): unsure at all Xaa locations
  Clone ID: MRT4577_98257C.1.pep
DDXXEEDEEEKQTKDLAGGGFGKDEELDENEKFLKEFFLKRPYLETEKSKSYLDNIQELSDEEELEIQEEYEHAYNYRHEEAMASGAVVADRVLGHSRVVEGSVRKKESSRKQQRKSKEERMARVKQEQAEELKHLKNLKKKEIAEKLERIRMIAGIEGDAACKLGADDLEEDFDPEDYDKKMQEMFDDSYYEADEVDPEFGSGEEMDLEKPDFGKEDELLGLPKGWASDHSKEESTATDAKGEKGKISLKDKVELEKEMEEYYKLDYEDTIGDIKTRFKYKQVKPNSFGLSTYDILASDDKDLNQYVSVKKLAPYREDEWKVTHH

SEQ ID NO: 367420 - protein, 89 aa, Zea mays
  unsure (1)..(89): unsure at all Xaa locations
  Clone ID: MRT4577_98258C.1.pep
GTPPPXXXAPALWTRSPRLHGPXTATERAVAPVRPRRKRLPRTDPRRLLRLRRRRWRRTSGRSPSRRRDPNHGGGSARREGGGRVSDVA

SEQ ID NO: 367421 - protein, 68 aa, Zea mays
  unsure (1)..(68): unsure at all Xaa locations
  Clone ID: MRT4577_98259C.1.pep
XDPRYPLSLGVRSHHQRACRLSPPPPALGRRDEGRREAPAGRGGKRSIMAGGEMILWYWFYWLLSFLY

SEQ ID NO: 367422 - protein, 60 aa, Zea mays
  Clone ID: MRT4577_9825C.1.pep
EKKRFFFQVDKDPNCNKSHSLKKKQGFSTRSQLYTLIKTKQPLLLFTQLFSPLHFPIAIK

SEQ ID NO: 367423 - protein, 37 aa, Zea mays
  Clone ID: MRT4577_98260C.1.pep
GARSPTLPLTLILQHNLHRKLLLFIIIYPHYQQSTSN

SEQ ID NO: 367424 - protein, 275 aa, Zea mays
  Clone ID: MRT4577_98261C.1.pep
IGTSSRPGRRPWSNDLDDPQFMCCVCLDLLYKPVVISCGHMSCFWCVHKAMHIFRESHCAVCRQPYIHFPSICQLLHHLLLKLETNDYKRREKEVLEEEKRMQTYSPQIIEFLNYKTNVGSYKENRNEDSKARPPQEVPLNDSVPDEHLKKIKLEDVSCPLCMEMLYQPAVLNCGHGTSGRKGSTRALHAEDPSNIHIGVGCDSCGVYPIRGKRYKCQDCTELIGFDLCEACYNSSSKLPGRFNQRHTPNHRMEVDNSALVHRILRHHGIPRGRP

SEQ ID NO: 367425 - protein, 74 aa, Zea mays
  Clone ID: MRT4577_98262C.1.pep
QGAVKRCDAMRCGRLARGPRLGAFGLLLALESSKSCCDWDASHSLRPFCFPSPKPAAPELARFMVTIRILQRVS

SEQ ID NO: 367426 - protein, 457 aa, Zea mays
  Clone ID: MRT4577_98263C.1.pep
MASDGHPPEPGKKEDVATTAAGPGANDLDDPQFMCCVCLDLLYKPVVISCGHMSCFWCVHKAMHIFRESHCAVCRQPYIHFPSICQLLHHLLLKLETNDYKRREKEVLEEEKRMQTYSPQIIEFLNYKTNVGSYKENRNEDSKARPPQEVPLNDSVPDEHLKKIKLEDVSCPLCMEMLYQPAVLNCGHVYCVSCLSSLNEETLKCHVCGSLHPGDFPNVCLDLDHFLEEYFPAEYELRGQKVQFKKDQCNRETSSSGTSGRKGSTRALHAEDPSNIHIGVGCDSCGVYPIRGKRYKCQDCTELIGFDLCEACYNSSSKLPGRFNQRHTPNHRMEVDNSALVHRILRHHGIPEEGPEGLMMEVVGPDAMVQILIDNQGMEEGNDEGPGEAAIEEPVGSLGSMSRLSHLFMYNPEMEDGNDEDSGEEAAIEEPVGSLGAMAPLFMYDQEMEDNEEDQAH

SEQ ID NO: 367427 - protein, 99 aa, Zea mays
  Clone ID: MRT4577_98264C.1.pep
VPRRYGAGGGTTAAGTAPPHDAVDDAHPGDDHDDDGTTCTCSSTSRRLVPTHPPDLHLHITHKTRTTFHVSSQLAALVRSTVMTTTDLVARFGTTLSSH

SEQ ID NO: 367428 - protein, 58 aa, Zea mays
  Clone ID: MRT4577_98265C.1.pep
FKASGKRMYVPIPMVEEPYFSIPAVVPPTVVTTRGETPARNSSDGGGDRLHRFVPMKQ

SEQ ID NO: 367429 - protein, 311 aa, Zea mays
  unsure (1)..(311): unsure at all Xaa locations
  Clone ID: MRT4577_98266C.1.pep
MRGRASHLRALLSRALSPSLPPPGRALPQVTRPGASPFGAGFVGRARFFSIDASAATQGGSKPPAPPPAGTAGGEGGGGGQSGKSEQADAGKAVRGGPVSWLSFLLLLVTGGGIIVYYDKEKKRHIEXHYEELKNRTSAVKPGQSVGTAAIGGPFKLLNHDGKPVTEKDFLGKWTLLYFGFTHCPDICPDELQKMAAAIDKIKEKAKLDVVPVFITVDPERDTVEQVRDYVKEFHPDLVGLTGTTDEVRQVARAYRVYYMKTEEEGSDYLVDHSIVMYLMDPEMKFVKFYGKNYDTDSLADGIVKEIKEHK

SEQ ID NO: 367430 - protein, 67 aa, Zea mays
  Clone ID: MRT4577_98267C.1.pep
EESLPFRNYHPKFLRHCLYLGFVQSICTVSVVVCKYFERNDRSCAFQLKVGKEVFYTKKKKKKAPRA

SEQ ID NO: 367431 - protein, 165 aa, Zea mays
  Clone ID: MRT4577_98268C.1.pep
SRPCSARGSRILSSSPPLRRYFSVAGISQTGSRCINQCGRPPRIRCLPCSPHTLPFDPTLPWPPETRPSPVPIASSIALVVVILVVVIVINLSVPCAAHAPRLGAHLHISVLVWLCSIRGSLWICGFSPCLILKTGFDLHIGRNHGGHWLLQDPTNIYIEFGIIR

SEQ ID NO: 367432 - protein, 50 aa, Zea mays
  Clone ID: MRT4577_98269C.1.pep
SHAFYPTPYALYTNAKTTFLRYIIYCATPSPHLYCPPSSTSSTYPPSPPS

SEQ ID NO: 367433 - protein, 49 aa, Zea mays
  Clone ID: MRT4577_9826C.1.pep
TPSLLPNPEVFLIIIEAHKLSTHFSLSFISLIFPFTQSTTPQFLHPYTH

SEQ ID NO: 367434 - protein, 38 aa, Zea mays
  Clone ID: MRT4577_98270C.1.pep
VSLIPPLLLPHQIKSRCFFTCSRGDSKSSAMAFIPATS

SEQ ID NO: 367435 - protein, 52 aa, Zea mays
  Clone ID: MRT4577_98271C.1.pep
IECLLWQCNSERNKIKGINNGIFIVFNHIQPLKKFKDLLSFFETKILKSYRI

SEQ ID NO: 367436 - protein, 82 aa, Zea mays
  Clone ID: MRT4577_98272C.1.pep
LALPRQEQSCWRGGGGRSLLRTALSYRPPLDDGTAGTTRTPVLAPGVGRLLGRQAAFPPPGVRSPARGPDPGHKCSHWEAGL

SEQ ID NO: 367437 - protein, 322 aa, Zea mays
  Clone ID: MRT4577_98273C.1.pep
MMSMTMASIHRMKWREAHLHSSDGERKLGGGSHEGAEKDRVATERHTEAGGGIAGSHDISSPDKKKVSGTGDKKHGPKKKPKRKKSGSICQMKFLNSTAQLVEPVRNEKFASFKLEYVEVEERPIGSEFWEPRFAGHQSLQEREESYKAHDQQLTCAFVKGPNGTSTGFDISDDDRKYMSKCHIAVSSCIFGNSDRLRTPFGKTITSLSKKTVCFAMFLDEVTLHTLESEGQKMDSMGFIGIWKIILIKNMPYNDMRRVGKIPKFLAHRLFPSSSEVTSHLSKLRLQTDPVPRVEHVVQVEPHRGVRFDLGGVSQLTFSRQG

SEQ ID NO: 367438 - protein, 66 aa, Zea mays
  Clone ID: MRT4577_98274C.1.pep
FGTRTHSGSSRLYRDAATQGMAMAPPPPPRLDAYRRRRFRNYLLRLEVDRTEDRADQREGALRLDL

SEQ ID NO: 367439 - protein, 145 aa, Zea mays
  unsure (1)..(145): unsure at all Xaa locations
  Clone ID: MRT4577_98275C.1.pep
RPGPDCETRSLITPKERRRRRWSRLPGCSKFPRVFAPRLTPSRRDLTPRYARDAADPPTDPVRELSMDSIRLAKSCQKTDRKELTKCXASIGMVFGTMGFGSFFDKIIFIPMINIIVSVLLISSTQDIDCRSEQWRLYLAETTVF

SEQ ID NO: 367440 - protein, 77 aa, Zea mays
  Clone ID: MRT4577_98276C.1.pep
PLVRTHVRPLMREKSYLVCMVACLHSLHMMGAMIDTILMTLVVEAIISQTSVWVICTQSLVWINLLGQLTTFESKMT

SEQ ID NO: 367441 - protein, 99 aa, Zea mays
  unsure (1)..(99): unsure at all Xaa locations
  Clone ID: MRT4577_98277C.1.pep
RVFCRMIYFVIKNFFWPISTEYLNMETSDRSQGAKSANEVALHDSGSTRTDMSHMDSIVPSCVLEDSLNNPETGVPRGAVVAEQNXKEIGLRIIRRCIL

SEQ ID NO: 367442 - protein, 460 aa, Zea mays
  Clone ID: MRT4577_98278C.1.pep
METSDRSQGAKSANEVALHDSGAKDHDTYTLGHSCTGNENSAVDEGSTRTDMSHMDSIVPSCVLEDSLNNPETGVPRGAVVAEQNEKENRIENHQTVYTEEGTTSGVSTKDAEASHISRSAEDVHEEVLDKEKMIISLEEEVKRLKAKLDQLEQHKHLVTESTSGVEYHGGKNGNHALNFGKLFVAQESTNQSYSPQIKYTKLNFKVDTFFAVGSPLGVFLSLRNVRIGIGKGQDYWQDKNIIEEMPCCRQMFNIFHPFDPVAYRIEPLVCEDYLKKRPVIVPYHRGGKRIHVGVQEFTEDISARSQAIACQLKSLKVKAVAALLALSRNDTEEDGESANEEGRSYGSIMMERLTGSPNGRIDHVLQEKTFQHSYLSALGAHTNYWRDHDTALFILKHLYRDIPEDPPSDVIERMPIKLFYEKDPVEEKTPVTFSARAAIKEFCRKVRAYSTKMEDDANC

SEQ ID NO: 367443 - protein, 484 aa, Zea mays
  unsure (1)..(484): unsure at all Xaa locations
  Clone ID: MRT4577_98279C.1.pep
METSDRNQGAKSANEADLHDSGAKDHDTSSLGYSCADNENSVIDEDSTRTDVSCMDSILPSCVLEDSPNNHDTVVPRGAVVADQNGEEKKVENYQSVYAEEGTTSGVITKKAEGSSISRSANEVHEEVLDKEKLMVLAKDKLILSLEEEVKCLKAKLDQLEQHNHLVTENTSGVEYHEGQNYNHALNSGKLFVAQESTNQSYSPQIKYTKLNFKVDTFFAVGSPLGVFLSLRNVRIGIGKGQDYWQDKNVIEEMPCCRQMFNIFHPFDPVAYXGLLYRIERLVTEDNRKKMPIIKPCDRCVITIHVGVREFRLESKARSKSIAREVKSLHDTWNSIRAXVPLKTVAAILALSSNDTEEDGESANEKEKSYGSIMMERLTSSPNGRIDHVLQEKTFQHSYLSALGAHTNYWRDHDTALFILKHLYRDIPEDPPSDVVERMHIKLFYERDPVEEETPVTFSDHAAIKEFCRKVRAYSTKMEDDANC

SEQ ID NO: 367444 - protein, 52 aa, Zea mays
  Clone ID: MRT4577_9827C.1.pep
MPQCYFAVDNNIFIFSLCSVQEDRPAGGQGGPRPGPGAAAPAPAPAPVAARP

SEQ ID NO: 367445 - protein, 584 aa, Zea mays
  Clone ID: MRT4577_98280C.1.pep
MRVLVEKLLVSVFLAAFYSGCMVVSLEYDHTASIECLGDPMKPLYKGGIVQNSEFNSGLMGWSTHRNVKAGVSRSPSGNKFAVVHGAGSYVSSSGKLLPSHSVYQRIQMQSDRHYSLSAWLQVSNGTSAHVRAVIKSPNGERVIAGAIVAQSGCWSMLKGGMTAYSSGPAEIYFESHAPVDIWVDSVSLQPFTFDEWDGHTRRSADKVRRRTVKVVAMGANDKPMAHANVSIELLRLGFPFGNAVTKEILGLPAYEKWFTSRFSVATFENEMKWYSTEWTQNHEDYRVPDAMMSLMRKYKIKVRGHNVFWDDQNSQMQWVKPLNLAQLKAAMQKRLKSVVSRYAGKVIHWDVVNENLHFNFFETKLGPMASAQIYQQVGQLDRNAILFMNEFNTLEQPGDPNPVPAKYVAKMNQIRGYAGNGGLKLGVGLESHFSTPNIPYMRSSLDTLAKLKLPMWLTEVDVVKSPNQVKYLEQVLREGFAHPNVDGIVMWAAWHARGCYVMCLTDNSFKNLPVGDLVDKLIAEWKTHRASATTDHNGAVELHLPLGDFKFTVSHPSLKAAAVQTMTVDNSASASQHTINVKS

SEQ ID NO: 367446 - protein, 39 aa, Zea mays
  Clone ID: MRT4577_98281C.1.pep
FIYTNLCSDPGGGGGAVATGFFDCASCFMLFLEPKTFYL

SEQ ID NO: 367447 - protein, 58 aa, Zea mays
  Clone ID: MRT4577_98282C.1.pep
LHTLVTMVRNVHHEQLANNKSQGMIECDPETVDRHHLTQEQNSPSRWHPCGEASGITT

SEQ ID NO: 367448 - protein, 85 aa, Zea mays
  unsure (1)..(85): unsure at all Xaa locations
  Clone ID: MRT4577_98284C.1.pep
IVTLFCCFKRDYTNPDLFVNQIIIEGIVQPTIGXEPKSSVLLGLVEXENMQYAVTVDVLQTVFSVFGAVKKITMFEKNSGLQALI

SEQ ID NO: 367449 - protein, 89 aa, Zea mays
  Clone ID: MRT4577_98285C.1.pep
AARGLSASVMLTVKAIKTMAILSGPDYLTSKRLAGQARYKNGGAFPKRVLVGRWLVIFRHFAQLVARSRVGCRSISVARGINWEFSVNF

SEQ ID NO: 367450 - protein, 174 aa, Zea mays
  Clone ID: MRT4577_98286C.1.pep
PTHPGSNRSSTTCSANVCTSPSFFFFSFLFLSFLLLIKNNNVVTNQSGAAPNQSFPFPALSPSLRLIHWPGPVPPTHLQVGPNRGIGISSWSTCSIFTHPTHPLRNFVCPLPFRSVSVARVSEGNGTPPAPLLRRVLAPPPDDDLVHLRGRAVAAAAFIGAAGPPRLAAGRALV

SEQ ID NO: 367451 - protein, 88 aa, Zea mays
  unsure (1)..(88): unsure at all Xaa locations
  Clone ID: MRT4577_98287C.1.pep
GTRPTHASTHSLSYSQAPHHENFSSAGRLFNQIPLPTSXQGSSIRKVAPYFQQALTPPLYLLPPTPDGSLLYPAFSDLLHPHLYQCFP

SEQ ID NO: 367452 - protein, 129 aa, Zea mays
  Clone ID: MRT4577_98288C.1.pep
KYGLDEEKACSELLSFSDSSGSSQDNCPDRNSLHLLTVPVPMERSERSRRARKDNKWRPRRGRTRSCTRRSCWTRTTVTAPRTQRLNEIDFLERMHGKRLLLMGDSMNWNREGSLVLCKGTNNHDCGGA

SEQ ID NO: 367453 - protein, 115 aa, Zea mays
  Clone ID: MRT4577_98289C.1.pep
RASGASALSGLQFAWAASPTSARRRGYCAWRAAASGGGAAAAATCRLRTEEGPPSLSSRSVDWASRISRRSDYTTRCWSSTAPSPCRRRTTTPSRLMATTSSLTLAHIFSWCRRH

SEQ ID NO: 367454 - protein, 87 aa, Zea mays
  Clone ID: MRT4577_9828C.1.pep
PLGSQPDPIDPEGGRAAAKAPVTASNWPRLSLTHRSYRRKHQTPNEARTGREPRASPRRCGAPTGWGRQRETHQRARWNQEANRSAS

SEQ ID NO: 367455 - protein, 114 aa, Zea mays
  Clone ID: MRT4577_98290C.1.pep
QSLSHTKHNCNGGCKSVGGAKTNTFTRIKKKRGTLPLCRYPSPGSSTVTLPDHGQDHFLLHTELIPIGHLLRLHMLLLVHLVLTTVHQSLTFVAVQHISKHAQLLLLLQIAILI

SEQ ID NO: 367456 - protein, 215 aa, Zea mays
  unsure (1)..(215): unsure at all Xaa locations
  Clone ID: MRT4577_98291C.1.pep
MADGKNKRISQAKNGDENETVHPFSNNDWHDITAPTLCRVRNIGKTLGSETQAIMIASEXMKHIVXFEXAYSDLLGCQHQAYMKITVRAEYAHLRNALTCFCCMNFTTDLLRSLVKMCEILIXEPCVYVKTTDXYMVRLVLASIFTKRLPNHVKTTCYAHASQIRQIRRKMVEIMIYHASTCDLKELGSKFIPXGIDKEIEKSTSSIFPLHNVFI

SEQ ID NO: 367457 - protein, 59 aa, Zea mays
  Clone ID: MRT4577_98292C.1.pep
PTRPQHGRRRPGCHRHNTAGGGSHSGATAGPLNHRKKFQGHIGRQNPEGFQRLVGRRSG

SEQ ID NO: 367458 - protein, 117 aa, Zea mays
  Clone ID: MRT4577_98293C.1.pep
PPIPQSQCRAAPQPQPLGFEVSTEPMPELPNPEKPDFWEGPQWEALGFFVQYMWAFGVVFGLIACGVAVATYNDGATDFRDTPAYKESQSQEFPEESESSSADVFEGNPTEVAPALE

SEQ ID NO: 367459 - protein, 38 aa, Zea mays
  Clone ID: MRT4577_98294C.1.pep
SKTMINLFSSSYIAAAFKGNNWDGITESNSSTVTISAT

SEQ ID NO: 367460 - protein, 186 aa, Zea mays
  Clone ID: MRT4577_98295C.1.pep
MALLASPTPFGAAAIRRRVAPLALIPAGGRAALHVALARRGGVSSRTQRRLEERGGKKRRGGVAAPDVDEDAAEAGTAVEWEGEPLGFEVSTEPMPELPNPEKPDFWEGPQWEALGFFVQYMWAFGVVFGLIACGVAVATYNDGATDFRDTPAYKESQSQEFPEESESSSADVFEGNPTEVAPALE

SEQ ID NO: 367461 - protein, 185 aa, Zea mays
  Clone ID: MRT4577_98296C.1.pep
MSLLASPTPFGVTAIRRRVAPLPLLPAGGRAALHVALARRGGVSSRTQRRLEERGGKKRRGGVVAPDVDEDAAEAGVAEWEGEPLGFEVSTEPMPRLPDPETPDFWEGPQWEALGFFVQYMWAFGVVFGLIACGVAVATYNDGATDFKDTPAYKESQSQEFPEESESSSADVFEGNPTEVAPALE

SEQ ID NO: 367462 - protein, 111 aa, Zea mays
  Clone ID: MRT4577_98297C.1.pep
GSNLKVSIYKEHRRYKIRSKGALTGGPWRGTRPSSSPTPTPTPTPLRYCARPDPPKANTDQNTIHRAITFRMRGETTGSRASIPYRTGPLQDRSPDVVKRRPPGAAVGRVG

SEQ ID NO: 367463 - protein, 41 aa, Zea mays
  Clone ID: MRT4577_98298C.1.pep
RARVRPRQRNPSTFSYQAQASSHHHVPLLEAMGMILHQLQL

SEQ ID NO: 367464 - protein, 104 aa, Zea mays
  Clone ID: MRT4577_98299C.1.pep
SLLHIKKLSNDEYLPKAFKFFDKDRNGFIEMAELMEALGDGELKPNEQVVNDIIREVDKDKDGRISYPEFELMMKGGSDWRNASRRYSRENFSSLSRKLCKDTL

SEQ ID NO: 367465 - protein, 86 aa, Zea mays
  Clone ID: MRT4577_9829C.1.pep
VVCVVQCSAGRFWRPARTERRDAARRLRPPQEQDRHGTDGRVGAVRCRSSPTASASRRKGSPHHGYALLACRGTGRRRVATRGDAW

SEQ ID NO: 367466 - protein, 55 aa, Zea mays
  Clone ID: MRT4577_982C.1.pep
ICRPFFLSFFPRKINKKCPFYPLSPFPPPGHTPGSPRKFPTQSPPAIQLPLLSTK

SEQ ID NO: 367467 - protein, 118 aa, Zea mays
  unsure (1)..(118): unsure at all Xaa locations
  Clone ID: MRT4577_98300C.1.pep
GNQHPRTNPPGETGQRRGAAPGERQGPAGTTRDGGTPPPGNXPRKGPPRAQGTGNPGSRGGXPNPTGVGSRIPGLFRSPPRGNGPKGXKTPGPGTXKKKKKKKKKKEEKKKNPPRAAA

SEQ ID NO: 367468 - protein, 59 aa, Zea mays
  Clone ID: MRT4577_98301C.1.pep
IFCQLLHSFWAIQYIGREPQKHQRDRYLESLLLHRCLLNSVRICALRPKPHTTKHAAQL

SEQ ID NO: 367469 - protein, 146 aa, Zea mays
  Clone ID: MRT4577_98302C.1.pep
NLLPLVLPSMVPGPEVPPRGAWIRVEPLPGPFFVNFGCQLEVVPNGFFKSLQPRVMTPLGVGGATGAPFFMPPPGCLFGPPPEFLKGDNPPWFRPLPFSGFKGILRVVKLGLSFNPPPNFKNVPKELCSSPQLCSPPPIGGEGLTN

SEQ ID NO: 367470 - protein, 50 aa, Zea mays
  Clone ID: MRT4577_98303C.1.pep
QGEKIFFYKRVPRYIGVFFSLMGGFTKKNDSKSFHFGWLKHFLGLKNLLA

SEQ ID NO: 367471 - protein, 45 aa, Zea mays
  Clone ID: MRT4577_98304C.1.pep
EHHLARIKSTSYIDEDDCGLENAIVIQGANDVALIAAGTSWGRST

SEQ ID NO: 367472 - protein, 186 aa, Zea mays
  unsure (1)..(186): unsure at all Xaa locations
  Clone ID: MRT4577_98305C.1.pep
MKIEQAFHSPYGQVHGKLVDQEQINRSLRKSYDDVEDAKAQRQQAEEPVCLSTLTYLKLNPLSSKLDCVFFKRALKKQPAFDKIEFFHIEPNRANKYTSSTVTSKAFIAVNECISFIEAITPVIQTNKESLSTLLDLVDDYGCEKMYACVDXENANAXHCPLLPLCGLHLTNDVVFPGYIMLLQEF

SEQ ID NO: 367473 - protein, 71 aa, Zea mays
  Clone ID: MRT4577_98306C.1.pep
SPAPTGFVSVPSYDDVFFDCVSDVYDRPLYGVWLPVFIWTGLMVSPLCSFVVSIIEEHCSSPPSSPSFVTP

SEQ ID NO: 367474 - protein, 143 aa, Zea mays
  unsure (1)..(143): unsure at all Xaa locations
  Clone ID: MRT4577_98307C.1.pep
VGEDRWRLSSAGSPALAISSRALSQRTSTWRSPASASLTKATVTAIVTGAATALLAGRTSMXQDALLAAGXAXLRLQPRQFTGKARDAFSFKIYVCLPDNVMLDDDQKTTACDTSKMSQEEYLNTTGESYSATLSVPCVYRFD

SEQ ID NO: 367475 - protein, 72 aa, Zea mays
  Clone ID: MRT4577_98308C.1.pep
VVLTRGRSKPPLAPPAPAPAPGAPLGPPPAAPRPRSPARRARSWSRYAATTCTKQMDGWTLAWHWHAWSVEH

SEQ ID NO: 367476 - protein, 56 aa, Zea mays
  Clone ID: MRT4577_98309C.1.pep
PTRPPTRPKKKKKKKKKKKKKKKKKKKKKKKKKKKKKKKKKKKKKKEKKKKGVALI

SEQ ID NO: 367477 - protein, 92 aa, Zea mays
  Clone ID: MRT4577_9830C.1.pep
GYLEGRPGPPYLVAWISRPVSHSPSHPDSICQRLSMPFDREIDWITPLWYVTMSTSSHTSADQLHVPNEVLWLPRMLPQLFPEPLILRSHPH

SEQ ID NO: 367478 - protein, 76 aa, Zea mays
  unsure (1)..(76): unsure at all Xaa locations
  Clone ID: MRT4577_98310C.1.pep
RAAGGLKQXCCYGDMQMAREVSTAMLLLLVVVATAAGDSAAASSGSNLGPRKPLTLQAGADDCITPENFCYFSDAQ

SEQ ID NO: 367479 - protein, 374 aa, Zea mays
  Clone ID: MRT4577_98311C.1.pep
GYSPAGARPSVDVNQEDQHYDPLSVVLDCQFCGACVALWPFSLVQRPLQLFKLISDSNRQDDQDNGHANIVSGVGHSKDANISFNFTIAGGPPPTRQSFRPKVSFPVVSRHLKADLNSRVNLLSSRSDCYMVPVASHASGSMKRIRSTDEPHLLEGDADDVDTSTIGANHDQPGENSEKSISNLVVSTEQKQDGSHSNAAKDTELDEASNETQPETGSPLRKSITSTYADADQHGLEPRFCSVQGTNEEPSGGVTLTEMHANNSRSTEVSTITESLVNREKEKQGLYDRMNEFDPIKQHRTFCPWTSPDYGEPLPGWRLTLSALLAGDKRSDGDLQVDIQTSLLDEEDDPLTSVRKLFMTPPPKRRRIQQSEKS

SEQ ID NO: 367480 - protein, 48 aa, Zea mays
  Clone ID: MRT4577_98312C.1.pep
FRTDTKRGCHLKPYNQTNLFLNIFKYAKPRFSKRWGLFFQNVLFSFCP

SEQ ID NO: 367481 - protein, 72 aa, Zea mays
  Clone ID: MRT4577_98313C.1.pep
TTKSFLLSEKKSSARFLTSRRCIVMAMTRPPAIYIECCTGIWQFCLMTKGEEITSRALMIPFLAIHAKKGEK

SEQ ID NO: 367482 - protein, 106 aa, Zea mays
  unsure (1)..(106): unsure at all Xaa locations
  Clone ID: MRT4577_98314C.1.pep
RSHAAPGRGPREGVNTFFLFCGCVDQASVAVVEKWGRFLRLADPGLHFFNPLAGECVGGGVATRVQSLDVRVXTKTKVNVFVRLICAFLFRVVWGVAGGALCVLGG

SEQ ID NO: 367483 - protein, 115 aa, Zea mays
  unsure (1)..(115): unsure at all Xaa locations
  Clone ID: MRT4577_98315C.1.pep
NSNAEXLVNIGCQWVILGHSERXHIIGENDEFIGKKAAYALSXQNVKVIACIGELLEEREAGKTFDVCFRQKKAFAGETSSSXEVHAAVRNWLKTNISHDVASSTRIIYGGSVQG

SEQ ID NO: 367484 - protein, 278 aa, Zea mays
  Clone ID: MRT4577_98316C.1.pep
ILSAAHHPRQVQSSPSPQPSAATRAHHAVAPPPPLVNGSVHPVHLPWPPPPSPQPSSTTRAHLRPPVAQGRSRPSSGWRWAPASCASRGRWALASFRTRRQLTDRAVLVEQSWWKLLDCAVLEFGRLSLSLMLPCWTQEPSSGQMKEQFVVEMLARPSSAAGSGPGRSQQRQEDASSAQGSRPQSSAASDTPVAQQPDANSVRAKLELAKNTKLEAAKRKLQEGYQEFDNAKKQRSIQMVHPQNLPKQANNTQNFQPSGPAASQGMAATGIGSSSNSF

SEQ ID NO: 367485 - protein, 34 aa, Zea mays
  Clone ID: MRT4577_98317C.1.pep
WLEAIDPRHRYGHNFHCYYECWLHSESKQPFFYC

SEQ ID NO: 367486 - protein, 261 aa, Zea mays
  Clone ID: MRT4577_98318C.1.pep
LGTSRPAGGRLRAHHAVAPPPPLVNGSVHPVHLPWPPPPSPQPSSTTRAHLRPPVAQGRSRPSSGWRWAPASCASRGRWALASFRTRRQLTDRAVLVEQSWWKLLDCAVLEFGRLSLSLMLPCWTQEPSSGQMKEQFVVEMLARPSSAAGSGPGRSQQRQEDASSAQGSRPQSSAASDTPVAQQPDANSVRAKLELAKNTKLEAAKRKLQEGYQEFDNAKKQRSIQMVHPQNLPKQANNTQNFQPSGPAAGQGMAATGIED

SEQ ID NO: 367487 - protein, 125 aa, Zea mays
  unsure (1)..(125): unsure at all Xaa locations
  Clone ID: MRT4577_98319C.1.pep
EXPGSDRTPRPRSXXGSQIGGAIYVGLVTQRIFPDXXFGVCICPGGWTDPLYLSQPTPAPAFKGGRRPINIVSICLHHGAALGAWGPVEIXHXAATCPLLVPPTACRLQVAWSAFALHQNTIVVP

SEQ ID NO: 367488 - protein, 86 aa, Zea mays
  Clone ID: MRT4577_9831C.1.pep
QQQQQPAEKKVHEDAVRGVDKTGDDAHGGGGLAARRDGGRHPLRRLARGLSRHRQVVLNVVLAVVLLWLVAFAKHKPGGGQAMHHA

SEQ ID NO: 367489 - protein, 47 aa, Zea mays
  Clone ID: MRT4577_98320C.1.pep
RHYVCATPPYTHTIPGTQQAAFVYGSCYADHGEPCSEHRSGHRRSRG

SEQ ID NO: 367490 - protein, 127 aa, Zea mays
  Clone ID: MRT4577_98321C.1.pep
MKSHTHPVKPRFQVSNRPKCNLLNKSSIDSEQTIQSSIASKITTLIDPRHRYDHNLHCYYDCWLHSESKQPFSYWPHLKKSYISLRKNSKLKERKLLGSRKSCKHNYKLNRPHLKKTKVCCARPKRK

SEQ ID NO: 367491 - protein, 91 aa, Zea mays
  unsure (1)..(91): unsure at all Xaa locations
  Clone ID: MRT4577_98322C.1.pep
HGALQLVPPPAHQPVAVLFPGELLAIDDQCSHFDQVWVFLVSILGLIRVHERVILLSDHIPIYSSPTTGGLLKHTXNNGTEIIITLLELWG

SEQ ID NO: 367492 - protein, 72 aa, Zea mays
  Clone ID: MRT4577_98323C.1.pep
IHTSFALSLLPLLISYARAGYRRELADQVVRAGSPRAPADLAQLTRTHCGSLPCRRAPHGIHPRRGSVQPLD

SEQ ID NO: 367493 - protein, 231 aa, Zea mays
  Clone ID: MRT4577_98324C.1.pep
MATSDELAQIDISKEEKDKLVAEVMRYVLFKTHQGSDCPIKREELTGIITKNYRQRALPTLVINEAKERLAATFGYEMRELQRTRAPATRSGRPAQRQFNADAKSYVLVSMLDPEVYSKYVEDKAAAHLSGFAFAVIGIIHLAGGKMPEEDLWHQLKRVGLNETDEAHLVLGNNKQALEHLVQQRYLLKEKIAGPEGHFVMYELAERALDESISVKIKDHISQVVGTCLQK

SEQ ID NO: 367494 - protein, 434 aa, Zea mays
  unsure (1)..(434): unsure at all Xaa locations
  Clone ID: MRT4577_98325C.1.pep
MQSSRLLSMSKRQPSPLSCNVEAKNASDCPNLFSNFSRGTGGAVSLPATSRACTWADAWAGFPAHRAAATTPAAEHRPRLHSTAPPPPQIPSSASCPAGKAHRAAAKVTSNIAPDLDMLIVKATSHDDEPAGERHIREILHLTSGSRAHVAAAVAGCSRRLSRTRDYVVALKSLMLVHRLLVDGDPFFHRELLHGTRRGTRLLNLSDFRDEAHSGSWDHSAFVRTYALYLDQRLEFFLHERKQGXSLTGSLLDHLQQLLDRFLACRPTGGAKQSRMVLVALYQIVRESFQLYSDICVLAVLLDRFFDXYAECVKAFEAYATAQDELCILCMSPTGVARSSEYPEVQRVTDKLLETLEKFMMDRAFPSNGGNEVTSAWQNPAAEPGKADWELALVETTSNLSMQKPAMSSGMDPLLLKMHFIVVTLFNISYHRIK

SEQ ID NO: 367495 - protein, 130 aa, Zea mays
  Clone ID: MRT4577_98326C.1.pep
MSSSTIRKALGAVKDQTSISLAKVTSNIAPDLDMLIVKATSHDDEPAEERHIREILHLTSGSRAHVAAAVAGCSRRLSRTRDYVVALKSLMLVHRLLVDGDPSFHRELLHGTRRGTRLLNLSDFRDEAHS

SEQ ID NO: 367496 - protein, 69 aa, Zea mays
  Clone ID: MRT4577_98327C.1.pep
NRGPLTQRVRPIPVEKWELQVEVQPSRNMHAYPKFTGSCMPQYALNHLGNDAWLDTRDTQYRSTVRQEP

SEQ ID NO: 367497 - protein, 81 aa, Zea mays
  Clone ID: MRT4577_98328C.1.pep
VSVLAFQTEICFYEQIDPRHRYDHNLHCYYDCWLHSESKQPFSYWPHLKKSYISLRKNSKLKERKLLGKQEELQAQLAQAA

SEQ ID NO: 367498 - protein, 89 aa, Zea mays
  Clone ID: MRT4577_98329C.1.pep
NRTKYNNMEPDAVDFFGECMNTPRNGRTPLANEIYEQMVAEKERELEEGEAQKSPSKIVADSLSQISRSSTFLPNIGVPQRPRLVGPHR

SEQ ID NO: 367499 - protein, 58 aa, Zea mays
  unsure (1)..(58): unsure at all Xaa locations
  Clone ID: MRT4577_9832C.1.pep
NVLNRSKKKKKKKKKKKKKKKKKKKKKKKKKKKKKKKKKKKKKYKKKKKKKKKXGGPF

SEQ ID NO: 367500 - protein, 162 aa, Zea mays
  Clone ID: MRT4577_98330C.1.pep
NQCWGPVAEHKETVSSASSTIATIYVFWRGLEACSTALRRLCPCLAAKSTLANLRKGKQRRMSSSTLFCYSIFAAPCVRESTSGIKVGGHEKQLVVKRGENAEIESNIQFQSYIRFAKKIQKQFKKISEQSTSANQESCRILKRVKLETLIAQITSPTHISY

SEQ ID NO: 367501 - protein, 268 aa, Zea mays
  unsure (1)..(268): unsure at all Xaa locations
  Clone ID: MRT4577_98331C.1.pep
SLFSSLVLHLLHPVSPCSPSHVELPWRPSHGRLLPLVAHGGALPAAARPISLNSLRRAPVPWLPSFNHGVRRDRARVHVPLHHHGEITKASGAIGLSYGALQPLHQQGRPGAGVGVPSLIPSPAELFTTVLSAQPQRPAPARPNWVSRLSLDAAMEFAGSRPSLLVLAVGSSLQFAVPLPCHGSWPLLLGFSGARAVRQPSPLTDGLLAACSDSCAMCPPPIAPLCLFSNRVGXWSHWPSTSFGLVWPCVVRLVDHGHCRVCLSLMHI

SEQ ID NO: 367502 - protein, 82 aa, Zea mays
  Clone ID: MRT4577_98332C.1.pep
NMTSFKCVFQVMFANNLHQITDVLSTACKTSTMSMKCPGHRYRETERSIFLFIIIVESIASRLNQIGVMFAASFCPYLASCI

SEQ ID NO: 367503 - protein, 57 aa, Zea mays
  Clone ID: MRT4577_98333C.1.pep
SVRRAYSLKRKRCQGSCEPRKYVMVFSLRYELGVASIQSVALTIWNQFFLKNTSLVI

SEQ ID NO: 367504 - protein, 70 aa, Zea mays
  Clone ID: MRT4577_98334C.1.pep
AESCTRHLGKQQTWETVIICGTIKKVVTSKVSILLLVLIRVTQEASSLPKSIIWQHLNPYFKGNTMNQHN

SEQ ID NO: 367505 - protein, 148 aa, Zea mays
  unsure (1)..(148): unsure at all Xaa locations
  Clone ID: MRT4577_98335C.1.pep
GRPVAVAHDHNIIELTXTNRPRLLCEVSAVITTLNRNWASAHIWTHNTLFAAVXRITDHDTALDVTDAERLERITDNPDYLCRGRNLSRRATASRRTGTTHTKRRMHQMMLDDGDYKHXSGTLHDRXQRPNVTERNCNDKDYSVVTIR

SEQ ID NO: 367506 - protein, 90 aa, Zea mays
  unsure (1)..(90): unsure at all Xaa locations
  Clone ID: MRT4577_98336C.1.pep
RSTPGQQPGRGPTTARRPKGGQXEXREERRPKEWDEPPPTISSDPNTLRTEKPPHKEISDDEDEEEKKDAEEGKVEDVPEEKEEKPHSTP

SEQ ID NO: 367507 - protein, 240 aa, Zea mays
  Clone ID: MRT4577_98337C.1.pep
GQLGGCVWPPRSYTCTFCRREFRSAQALGGHMNVHRRDRARLRQCAPPDHDQEPIAAPLPAPELADHQQQLLQLHGSPMTKAAVLFSGRPAAACCTHQQTYCNNNREGEGEDSPARYISTTTTIIKDSKSKVLISIPAATTATGSKKAATTIAIIGEEEEEEEEEEEIMVTGRRTKRRRLVHQPFYDLRRLPPASSSPNKGGVEDDDAKVPKLSSPSSLSHHLAGRQEEVDLELRLGTSC

SEQ ID NO: 367508 - protein, 90 aa, Zea mays
  unsure (1)..(90): unsure at all Xaa locations
  Clone ID: MRT4577_98338C.1.pep
SAPLALCKGRGHTLICSAVPGVCVPAPETGFAAPVLIPCRSVYKLVCYYTXSRSQHREGDGCCIPDALDRCLXTHIIYSCANVLNDHNDS

SEQ ID NO: 367509 - protein, 103 aa, Zea mays
  Clone ID: MRT4577_98339C.1.pep
RKFIFSPDKPRGGPGPETGQNIFALPPLLSLPGGAQYNFIYPGAALHCTALHCTKNCSLALEWAPLFSTQRKTQQEPGLPPKAQPLFVQSIGGFRFVPSRPGR

SEQ ID NO: 367510 - protein, 107 aa, Zea mays
  unsure (1)..(107): unsure at all Xaa locations
  Clone ID: MRT4577_9833C.1.pep
SPDQSSSGRSDCETPRPRTFSLAHRSSPRPPSPPLAPSRXRALSTSSRLLNEXRSSRSSNKRGLRAEPTPRSPRQSRRTTRPRSPPGRCSSIRSRRRLRRTRDGRTT

SEQ ID NO: 367511 - protein, 74 aa, Zea mays
  unsure (1)..(74): unsure at all Xaa locations
  Clone ID: MRT4577_98340C.1.pep
SDSRGVHLGCVLWADSKHEKSPGQGSNNLCTKATKEAWKNYPTPELELVVVVHALKFLRHYPYVWFPISRXKHV

SEQ ID NO: 367512 - protein, 138 aa, Zea mays
  unsure (1)..(138): unsure at all Xaa locations
  Clone ID: MRT4577_98341C.1.pep
GGRGGXSGNKIRMCTGCYAXAARRNCXDNTGVKNLYIISVKGIKGRLKRLPSSXGAHMSMPTVKNGKPDLRNKGMPAVIRRQRKPXGRKDRVYMYFEHNAGEIVNPNGDRMGSVITEPMGKEXVDLCTRIASAANAID

SEQ ID NO: 367513 - protein, 58 aa, Zea mays
  Clone ID: MRT4577_98342C.1.pep
TECKRQNTVTCSIQSNQCLCLGSEGICTSSRHGHFPKPRLHACFTVASSAHWRSNTIN

SEQ ID NO: 367514 - protein, 73 aa, Zea mays
  Clone ID: MRT4577_98343C.1.pep
DSDVRSDSAELSDFAEDSHVMVVLCDGGGVVVVSDSAVSRTCFADEEWSEITRTLHKLERVHPLSHVFLHLFV

SEQ ID NO: 367515 - protein, 108 aa, Zea mays
  Clone ID: MRT4577_98344C.1.pep
WHLQIGTNLLRMRESSMMDQSISARTAAFAYRHGSPRIELRVFISPSLLRAPPPPLPPPQPLFCGKNIQYKQCGAVSAQVPNLVKRAPWRNRPEAQLHWRLWIVSRAE

SEQ ID NO: 367516 - protein, 105 aa, Zea mays
  unsure (1)..(105): unsure at all Xaa locations
  Clone ID: MRT4577_98345C.1.pep
RGRCRSRPSCGAPGGPRWAPVAVAPPSPPAVGSCSSRLVSVRFRSVSMSAGRSVGGSSRDPLLARSPGRALFLARALAYVFGVAGDFRVLPLCPPPXWCRPGGIG

SEQ ID NO: 367517 - protein, 177 aa, Zea mays
  unsure (1)..(177): unsure at all Xaa locations
  Clone ID: MRT4577_98346C.1.pep
MAAADRREPGESLLAELLLLALVNTGQCLKTHQRRIKFPRRKNEIHTPRKTREVKVKQNRKLDHILEWLRRNQPDIDGLTGRDSNQLNESDPCSPEKFITHQDGYDDSDPGHGFENIRKHKFGYANTSKXTPPMIGSPQKTRRMVLSMTQNVMNGFKXPEGELIYVLLADDLIAIDR

SEQ ID NO: 367518 - protein, 86 aa, Zea mays
  Clone ID: MRT4577_98347C.1.pep
AAASGNDCEGDYLRPGPVRVPLERTRQPRNLGQSLRPSRMYMDQTSIYQLNVPQSQSKYLSSACPHSLLAPQCSHQLPYLMPATIS

SEQ ID NO: 367519 - protein, 47 aa, Zea mays
  Clone ID: MRT4577_98348C.1.pep
FGKSLLYLKDTVRASTKHHRAPANLPTRVLLPRCRHAARAPPAIAAG

SEQ ID NO: 367520 - protein, 145 aa, Zea mays
  Clone ID: MRT4577_98349C.1.pep
KIADFGVARIEASNPSDMTGETGTLGYMAPEVLNGHPYNRKCDVYSFGICLWEIYCCDMPYPDLSFSEVTSAVVRQNLRPEIPRCCPSSLANVMKRCWDANPDKRPAMAEVVSMLEAIDTSKGGGMIPTDQPQGCFSCFGRHRGP

SEQ ID NO: 367521 - protein, 331 aa, Zea mays
  unsure (1)..(331): unsure at all Xaa locations
  Clone ID: MRT4577_9834C.1.pep
MYSLPGAMSTAPARVISSSSSSSSFVEPLLLAAASPAAAAANSHHQVRQRGHLVRTLAASSSSSNTLLRSDFDLQEGLTTDVKRMLRQRQKKSGGGREMLVTIDNLKRLCIDHYFEEEIEAAMXDRRLHXLLHSDDLFDATLAFRLLREAGHDVSAKDDVLRRFIDGASGDFKLSLSNDVRGLLGLHDMSHLDVGGEAALLHRAKEFSSSHLASAVRYLDDPSLAEYVRQSLDHPYHLSLTQYKARHHLRYLQSLPCSCRDAAVERLAVAEFQLNKSLHQGEMREIKRWWMDLGLAEEIPVVRDQVMKWXXGSMAXLQGSSFCQXRVEITK

SEQ ID NO: 367522 - protein, 217 aa, Zea mays
  Clone ID: MRT4577_98350C.1.pep
ITSSALSRYYYRRTGESDSKSITVRSAVLVNLRATPGIHALASMMESGNDNNGGARWGNKLGYMLIPFHLAKHDDPTEYVRTAAKVTRRKKSSMESAFTFWSGDMVLRLFGIKAAAALCYGMFTHTTLSFSSMVGPTEQVLFCGNPIVYIAPSTYGHPHALTVHYQSYINSVKLVLSVDEAQFPDGRQLLDDFAESLRIIREAAPGKPGDTQDAAST

SEQ ID NO: 367523 - protein, 110 aa, Zea mays
  Clone ID: MRT4577_98351C.1.pep
GTLRIKAAAALCYGMFTHTTLSFSSMVGPTERVLFCGNPIVYIAPSTYGHPHALTVHYQSYINSVKLVLSVDEAQFPDGRQLLDDFAESLRIIREAAPGKPGDTQDAAST

SEQ ID NO: 367524 - protein, 118 aa, Zea mays
  Clone ID: MRT4577_98352C.1.pep
MELQARCVCVVAMLLVASFAGLDTAHGAGECGRVPVDQAALKLAPCAAATQNPRAAVPPSCCAQVRAIGRVPKCLCAVMLSDTARKAGVKPAVAMTIPKRCAIANRPVGYKCGPYTLP

SEQ ID NO: 367525 - protein, 150 aa, Zea mays
  Clone ID: MRT4577_98353C.1.pep
MITPLKKHTIVKKHTATFKRHQSDRYKTVKESWRKPKGIDNRVRRRFKGQIAMPKIGYGNNKLTRHLMPSGFKKFLVSNIAELNLLLMHNRTFAAEIAHNVSSRNRIAIVERAQQLNIRVTNANASCQNPMLKYLRLEPRPPFLPPTFFF

SEQ ID NO: 367526 - protein, 45 aa, Zea mays
  Clone ID: MRT4577_98354C.1.pep
QVRHKSTITNFLRHKVQIHTKITGQLQRTITLMNLTKCKRPKINC

SEQ ID NO: 367527 - protein, 41 aa, Zea mays
  unsure (1)..(41): unsure at all Xaa locations
  Clone ID: MRT4577_98355C.1.pep
STSSSTRSITSQHXXIGXSXQPKRVGYYYCECSLWIKATYL

SEQ ID NO: 367528 - protein, 85 aa, Zea mays
  unsure (1)..(85): unsure at all Xaa locations
  Clone ID: MRT4577_98356C.1.pep
GRGGVPAGGRRPGSAADGARWRQQXSGGYDDERKNIRMMRNRESALRSRARKRELEKEVRRLVNENLKLKRQCKQVTNSSTLCLL

SEQ ID NO: 367529 - protein, 168 aa, Zea mays
  unsure (1)..(168): unsure at all Xaa locations
  Clone ID: MRT4577_98357C.1.pep
ALTQSRRMPRSPQLSLSGCSSLFSLSSTSTSRDSXPEGAGAXGAPLSCRSASARRKRTRVRXGGVPAGGRRPGSAADGARWRQQXSGGYDDERKNIRMMRNRESALRSRARKRXEHESKQLNPCLSLTHKHXAYVQELEKEVRRLVNENLKLKRQCKQVTNSSTLCLL

SEQ ID NO: 367530 - protein, 45 aa, Zea mays
  Clone ID: MRT4577_98358C.1.pep
AMTFRYEMTGSRTKYRRVAGAFPLEAESGLWYYNVQISRGRCRYT

SEQ ID NO: 367531 - protein, 139 aa, Zea mays
  Clone ID: MRT4577_98359C.1.pep
PYVCITVFEVLGLVGDAHVLIRDRQRKIFGLVNMPKLQIFKSAVDGLVTSLEKYPEEEDIYGIMFSIGKNHGSFSANIAKHLAKEITMASDGELILDKPRVKALLIVSISAPFSNDKHKQLGIPSIIFLYAIPLLEKIS

SEQ ID NO: 367532 - protein, 135 aa, Zea mays
  unsure (1)..(135): unsure at all Xaa locations
  Clone ID: MRT4577_9835C.1.pep
MLRQRQKKSGGGREMLVTIDNLKRLCIDHYFEEEIEGAMXDGRLHXLLHSDDLFDATLAFRLLREAGHDVSAKDDVLRRFIDGASGDFKLSLSNDVRGLLGLHDMSHLDVGREXALLHRAXKEFSSRHLASAVRY

SEQ ID NO: 367533 - protein, 409 aa, Zea mays
  Clone ID: MRT4577_98360C.1.pep
MDGYGEAAAVAMELEAEASPSRGRSSPVVSGSPSQNSDGSMSSWRLGLKNSIQTNFGDDYVFQIASCQEISTLAVSLSTNALKFYSPETGQYLGECKGHEGTIHEISFSAPSSPQVICSCSSDGTVRAWDTRNFKQISLLRGGVSQEMFTFAFGGSNGSLLAAGSNAQVLFWDWRSSRQIACLEESHMDDVTQVKFTPDQQSKLISAAVDGLICVFDTDGDIDDDNHLLSVMNAETSVAKVGFFGNKYKKLWCLTHIETLSVWDWNDGARELNIEDARSLATDRWNLDHVDYFVDCHYSVPDDRLWLIGGTTAGTLGYFPVRNDHDGPIGSAEAILEGGHTGVVRSVYPSSGIHGRLGQNRGIFGWTGGEDGRLCCWRSDEIAETNKSWISSSLVWKQQKKTKNRHQPY

SEQ ID NO: 367534 - protein, 199 aa, Zea mays
  Clone ID: MRT4577_98361C.1.pep
MAWYERRRPRLGIVSRKGRRVVENQAAVAQLAASVGFDVDIMETANGAPLSAVYASVSSYDALVGVHGADLTTFLFLRPGRAALAQIAPLGITMLSRNLFGVPAARMGLHYVQYDVSARESSLSRRYPLDHVVVADPARARREQGKQEWELVEHVYLRGQNVSLDLGRFRETLARIHSRLKEQQQGHASRSSPDASPQI

SEQ ID NO: 367535 - protein, 154 aa, Zea mays
  unsure (1)..(154): unsure at all Xaa locations
  Clone ID: MRT4577_98363C.1.pep
NSGARQGEGKLYLCYYMGHTGXVNAQVTXMKWRPYGKLSYAYNSNYKNDTIIRTVVFFXPTMLAQVSMIIHXCDIMKDDDSNWTETXNLXRQELEIAMGNEHIXFTTWKICFLINVQSIMDPKSLRIFYYLAHDLKSMRASLINLYFMIKPIQS

SEQ ID NO: 367536 - protein, 267 aa, Zea mays
  unsure (1)..(267): unsure at all Xaa locations
  Clone ID: MRT4577_98364C.1.pep
MAIQDELNNYKTNEVWSLVPCPKQNVVGTKWVFRNKQDEYGVVTRNKPRLMAKGYAQIAADPTLFTKTCHGDLFICQIYVDAMIFGSTNQKSREEFSRMMMQNFEMSMMGELTYFLGFQVKQLKEGTFIPQMRYAQDAIKKFGMKDTKLTKMLMGTDGHLDLNVGGKSVDQKKVKNKVEMQTLVDDVGIFTEVSKTTQDSDYDRCKVDRMSTLGTCQLLRRSLVSWSSKKQTFVAISTTEAEYVAASQCCAQLLWMRQTLRXFGYNL

SEQ ID NO: 367537 - protein, 80 aa, Zea mays
  Clone ID: MRT4577_98365C.1.pep
FLFIKEILVSLFFPELRNKNYVVCTEVTICPTNTFFSCGQLEFCSAPAMKFITMLLALFMVMKHNKRCSYRSASSCLKLT

SEQ ID NO: 367538 - protein, 89 aa, Zea mays
  Clone ID: MRT4577_98366C.1.pep
GQKSREPSIFAPPDSKQSPPPRGPPTFTLPKQQGPPQQSLTGPNNRTPPLQNFGMEGPVRFCKTRSRINARVHHFFLAAALETLAPGGS

SEQ ID NO: 367539 - protein, 50 aa, Zea mays
  unsure (1)..(50): unsure at all Xaa locations
  Clone ID: MRT4577_98367C.1.pep
QQANYDRCRTYKGRQICQTPPQKAVGWXESSLTPQGINTGRVGGRLGRTG

SEQ ID NO: 367540 - protein, 77 aa, Zea mays
  Clone ID: MRT4577_98368C.1.pep
LQLLLLLPASIIHGGAREGTRTAAANQALALLTFLPAPEAAVRAGLCLGARAPGPPSCALRARLTCLPRRRRGSGSC

SEQ ID NO: 367541 - protein, 44 aa, Zea mays
  Clone ID: MRT4577_98369C.1.pep
PDTTGVICFFGLILFHTFLKTTPGKVLKLYIVRAMAPVNFFLSS

SEQ ID NO: 367542 - protein, 357 aa, Zea mays
  unsure (1)..(357): unsure at all Xaa locations
  Clone ID: MRT4577_9836C.1.pep
MERYELLKDIGAGNFGVARLMRNKETKELVAMKYIPRGLKIDENVAREIINHRSLRHPNIIRFKEVVVTPTHLAIVMEYAAGGELFDRICNAGRFSEDEARYFFQQLICGVSYCHSMQICHRDLKLENTLLDGSPAPRLKICDFGYSKSSLLHSKPKSTVGTPAYIAPEVLSRREYDGKTADVWSCGVTLYVMXLVGGYPFEDPDDPKNFRKTIGRIMSIQYKIPEYVHVSQDCKELLSRIFVANSAKRITIREIRNHPWFLKNLPRELTEAAQAMYYKKDNSAPTYSVQSVEEIMKIVEKARTPPPSSTPVAGFGWAEEDEQEDSKEPDEEHEDGEDEYEKQVKQVHASGEFHLSC

SEQ ID NO: 367543 - protein, 249 aa, Zea mays
  unsure (1)..(249): unsure at all Xaa locations
  Clone ID: MRT4577_98370C.1.pep
HGLIRDAEGRKMSKTLGNVIDPLDTIKEYGTDALRFTLSLGTAGQDLNLSTERLTSNKAFTNKXWNAGKFLLQNLPDKNDVSAWDVLLSNKFDSETSLQKLPLAECWXVQGLPELIDKGSKSFDKVFFGDAXEKYMITFGGILVVGFLELGKQRFTNSGARTVVVPAKRVLGFVLETILKYWLPLMPFVIEXIXQAFPYKKQALMVTPWPTTDLLKNWRSIKRFQNWQSWLKGIKIVQPKYFVEPVKRI

SEQ ID NO: 367544 - protein, 76 aa, Zea mays
  Clone ID: MRT4577_98371C.1.pep
YVWFKIFIKLYIIEWTDHPLNIYHMYIPPFLYCIYEHYIWIASPGILSLGRPIDICVVLGLGVGRRLVSKAVRRVW

SEQ ID NO: 367545 - protein, 151 aa, Zea mays
  Clone ID: MRT4577_98372C.1.pep
TIFLKDLDWVFKKSTARWKIVVGLPPLRGVGGPGALKEFLELLLPVPKAKGVDFYINGPVPCLGPFCSKAGPLQFFPRGGGFKAWKGFFLPKKGKLGFFFAGQGFLSPQLNQARGPFFFFAVFGNNLARWGLKHPPPPPYFVGEKIGLFLP

SEQ ID NO: 367546 - protein, 127 aa, Zea mays
  Clone ID: MRT4577_98373C.1.pep
LLFFCLFFFRTRKKSLYLYIKNPPCRALYFKQQYIALHACHTGSLQLYAFQMLNGNPLSNAVYCGHKEIILWPSLNLLCRCTQRNPSCRAYSGGRAGLEEAPIPCWTLLQLSMDVLCASGMCPVHDP

SEQ ID NO: 367547 - protein, 197 aa, Zea mays
  Clone ID: MRT4577_98374C.1.pep
MEMAHPGASASAGVADITGEVAFWTACPHCCYVHSFPRLYLGRRLRWPTSGWRRAFVGGELPGPAPIGPGFDMDFWTWAFFSLGPPGTGERWVPFTTFHPFNSRAGPFPGPNPGGTFGDTPFIGGPTFRRKMGVCFKGRARAEAEEEEVAAAIDLEVEAEAGVLGEQWDSGIAINETVDLSELGFRVDEMGVLHDLP

SEQ ID NO: 367548 - protein, 105 aa, Zea mays
  Clone ID: MRT4577_98375C.1.pep
EFQCRPRRTRTRTPTRPVLTYIGQRTINCRIRILLSTGNNPFASSASRPCSKPTQSITGRCYSTTYRSSRIILSLCYHGCTTLTAFLSSSTRIPATYSRSLWKTS

SEQ ID NO: 367549 - protein, 107 aa, Zea mays
  unsure (1)..(107): unsure at all Xaa locations
  Clone ID: MRT4577_98376C.1.pep
LPVLGFVVAFSFLACGGLPVGGFSLCVSCCPGACPRLFAVCPLPCLVRWSGLGLCLFWVWPSSAVVWCRSPPPGWCLVCRWVCLPRFGSFWXGAPGPLWVRSACVCV

SEQ ID NO: 367550 - protein, 97 aa, Zea mays
  unsure (1)..(97): unsure at all Xaa locations
  Clone ID: MRT4577_98377C.1.pep
FSXALCVVALXPLRXVWPWSSRXLCAXXVWVCLLAVXCXLLGXAFXFVXLSLVXRFXVPVLCXXGFXFCPGVSFLXXXLVXXXVPVPLXLPQCXWPP

SEQ ID NO: 367551 - protein, 276 aa, Zea mays
  Clone ID: MRT4577_98378C.1.pep
GRVGGCRPWRRRRRGIGLKTSKRAGRRPSLNCARLATHLGRVTPCFAQIEWYKALFDAEMGYYDAFKQRRSPRKYTKVNLNRIKLGQFWDRVLSMLDAGQLPHDFHRRAKWVNACRFYQLLVEPLDIADYHRHGHHLTSGSYMTHGRERRYELFDRWWQEKACTGAGGDITSSMLAASASSRRRSKYAGLTQDPCFWARVEEAREETESARGERDVAELAMKLEELQEFERYSRELVANKEVSVDVLAPQSSYTPHVEEWNQLKLRDEVRTLLLQF

SEQ ID NO: 367552 - protein, 101 aa, Zea mays
  Clone ID: MRT4577_98379C.1.pep
SIYLVLVLYRHQANTCCHRARSTNHYQMVVMANSCCILESDPFNWGEAGVICPRSTWTRSSAWSRRTEGNRSRTRAPPSGLAMWSPRPASRTPFHACMKLN

SEQ ID NO: 367553 - protein, 139 aa, Zea mays
  Clone ID: MRT4577_9837C.1.pep
KKRGRVLKARRSQWPPEGRASTRLGFFPAEGRVGGAPFGGEPVAPPPPRGGDPHCPLGDFPCGGGRPTTAFSAPPGTTPLSFPAGSVIRSKSWSPLFPALGLLMFFQFWAHKVPPAPFFICAPVDLPPGPSPFCFGPLC

SEQ ID NO: 367554 - protein, 122 aa, Zea mays
  Clone ID: MRT4577_98380C.1.pep
FPSPEELNKMLKAMDDVDMLTLVIQKMSKAFPSLMDTLLHERDMYMFSTLLKSAREYSSVVAVVGKGHVSGIKKNWQQPIQVNCLLELPDANQGPSKLKILASIGALTGVIIASGIYVWGRK

SEQ ID NO: 367555 - protein, 70 aa, Zea mays
  Clone ID: MRT4577_98381C.1.pep
GPMEAFLQLGRIRLEVQAYDLPATTHASAPTPPVRLNGRATSSLEDHLASLCNRSLYRSISLLSPRAIRS

SEQ ID NO: 367556 - protein, 76 aa, Zea mays
  unsure (1)..(76): unsure at all Xaa locations
  Clone ID: MRT4577_98382C.1.pep
RPRCXXXRTHXDXVGXRXIGSCGXGXGGRXXXREEGEVGGSGXGAREERXXRRXAGRXKAVXVPAXHHXXQVAQRX

SEQ ID NO: 367557 - protein, 63 aa, Zea mays
  Clone ID: MRT4577_98383C.1.pep
LDLIMDKHARVCAVAASCYDIGHLTYVLDGDNLRHGLSMELRFGAYDGTRTSAEGSSSTVWRY

SEQ ID NO: 367558 - protein, 115 aa, Zea mays
  Clone ID: MRT4577_98384C.1.pep
FPPVFFHFFHGGGKRKKPGGPEMIKWPPQTEKNPADRTRGVIKKPPEEFDFSRGGLNKKKKLRVQKGGAPPNITPEKKKGGGGNRGGSNRGRGAGNMGRGETARRPAKTPPGLRT

SEQ ID NO: 367559 - protein, 69 aa, Zea mays
  Clone ID: MRT4577_98385C.1.pep
KTAIKQKKEVKVSSMHIATELLLKGFSQVSMENSADTREAKVAKSSGGIFHVPTVNDLHEKHHEKGVSS

SEQ ID NO: 367560 - protein, 122 aa, Zea mays
  unsure (1)..(122): unsure at all Xaa locations
  Clone ID: MRT4577_98386C.1.pep
MVSSSMMFVAAPCLTLCLRSVTTTLFLSSALEHIPPKINKGDXQIITPCGNSNNKGXKVGSXESALLAKLGIRPFWYCLQATTVYQDGSLLTPAVLYLYADDLIEQCSTGASMAALPHYWQI

SEQ ID NO: 367561 - protein, 81 aa, Zea mays
  Clone ID: MRT4577_98387C.1.pep
KRPFTPTQLILVTSLISPPKFFLLFFPLFFFFKFLTNNIFPQKTLFPFFSPTFNTPPYKKIFFPSKSPSKISGLTHGSPPL

SEQ ID NO: 367562 - protein, 99 aa, Zea mays
  Clone ID: MRT4577_98388C.1.pep
GVDPLVWGNHLELFQMDSLPQDLPCCLFVWGWFPPMSRKGWWGRFNGGGKDKVPLDPPGSRVRDFCRDLFHCWGACLQNQARPQLLLNPLGLFWVCVVG

SEQ ID NO: 367563 - protein, 90 aa, Zea mays
  Clone ID: MRT4577_98389C.1.pep
PRVVSRASGAADGMLFVAVKESLRNKPRENKFKVEHEHTCGTLFIVNLSGACNMVTIARVMGVKYTFSTCTMIMLSVIGKCGCTTLYWPR

SEQ ID NO: 367564 - protein, 84 aa, Zea mays
  unsure (1)..(84): unsure at all Xaa locations
  Clone ID: MRT4577_9838C.1.pep
MRECIXIXMGQAGIHVENACWELYCLEHGIQAERQMPGHKTIGGGDDASNTLFSETGAGKHVPRAVCDDLEPTVIYXVRTDTYR

SEQ ID NO: 367565 - protein, 50 aa, Zea mays
  Clone ID: MRT4577_98390C.1.pep
LPARYGLAKQKLLAPAVLNQRTPIRVATSKLYGSSGPVCLPVIPLGPAKR

SEQ ID NO: 367566 - protein, 178 aa, Zea mays
  Clone ID: MRT4577_98391C.1.pep
MPPPPPPPQQQQQQSGMTLCRLPTATLGLPLSLPCLLPRSRPRLCFAARHARAVAARASSSSPSPDSSFGSRMEESVKKTVADNPVVIYSKSWCSYCMEVKALFKRIGVQPHVIELDHLGAQGPQIQKVLERLTGQSTVPNVFIGGKHVGGCTDTVKLYRKGELASMLSGLDININNS

SEQ ID NO: 367567 - protein, 119 aa, Zea mays
  Clone ID: MRT4577_98392C.1.pep
GLRRRFSRLYVLLRSSNPDPRYLLWCRRFRLWGRTFLHRRSMPFPRDLALHAPVGGTAALIGGVLPRGGTKGPTNEKEQHRFAAGTANESLVHHHDRPYRKVAKRRSQSSIRKKDKGKK

SEQ ID NO: 367568 - protein, 154 aa, Zea mays
  Clone ID: MRT4577_98393C.1.pep
MADVDVDTEVAAGAQPKKRTFRKFSYRGVDLDALLDMSTDDLVQMFPARARRRFKRGLKRKPMALVKKLRKAKKDAPAGEKPEPVRTHLRNMIIVPEMIGSLIGVYNGKTFNQVEIKPEMIGHYLAEFSISYKPVKHGRPGIGATHSSRFIPLK

SEQ ID NO: 367569 - protein, 167 aa, Zea mays
  Clone ID: MRT4577_98394C.1.pep
ASTAVFSRPADVLCAARYGATVVQRLHSRQVCRRSPAPPPPSSLLPPPTAPSAHSRRQCPVLLLLSADSELICLLTVLSADSAQSIATASAHSRRRQCPVLLTVNLLNQSLFGDSEFEWQQIARHCLPVKFYNKSEKTFQRSFKHLNVEKLVHNVLTFYRFNNHGSE

SEQ ID NO: 367570 - protein, 47 aa, Zea mays
  Clone ID: MRT4577_98395C.1.pep
PTASQCSGKVAVVESERKRQCFLCVTIVVVKENPIQISQRKRKIVSL

SEQ ID NO: 367571 - protein, 93 aa, Zea mays
  Clone ID: MRT4577_98396C.1.pep
TQPFRNLHLPGITSQGSIRSSHSFFNVDVHSFRTYWLNNIKIGIIMIVHYTSPGNLDNVMLLFYLTPIKISITANMVRNRYSLFFSLGLFFFI

SEQ ID NO: 367572 - protein, 37 aa, Zea mays
  Clone ID: MRT4577_98397C.1.pep
ISNNPSFDRPVSNIPTQSIVLEKFSPDFCPTTQAFLK

SEQ ID NO: 367573 - protein, 107 aa, Zea mays
  Clone ID: MRT4577_98398C.1.pep
RSGCHPKEAYSYTPDLTLTLNNNLANAYTVPKCTSPYANAYGLPCPHCPHLTEIATPAHVETDHTPEHTPAEPPGAHHATGDDDRDILHTEADESYANPHIKMLDDL

SEQ ID NO: 367574 - protein, 57 aa, Zea mays
  Clone ID: MRT4577_98399C.1.pep
KEVDIECKLRGWSIQENESARPTMLQLVKFLQGLSDRGMPPFTKVLNAVTGGSQPCL

SEQ ID NO: 367575 - protein, 96 aa, Zea mays
  Clone ID: MRT4577_9839C.1.pep
MKAIPVALLLLVLVAAASSFKHLAEAADGGAVPDGVCDGKCRSRCSLKKAGRCMGLCMMCCGKCQGCVPSGPYASKDECPCYRDMKSPKNQRPKCP

SEQ ID NO: 367576 - protein, 42 aa, Zea mays
  Clone ID: MRT4577_983C.1.pep
VFVYIEDCYLEIGKSSARLRAAGGWSAGRSSGGPPCSCARRA

SEQ ID NO: 367577 - protein, 49 aa, Zea mays
  Clone ID: MRT4577_98400C.1.pep
QIRTDHISFSVTIIANGILYPTALTLLTLILPTIRLSNPAPPPCYHCLK

SEQ ID NO: 367578 - protein, 89 aa, Zea mays
  unsure (1)..(89): unsure at all Xaa locations
  Clone ID: MRT4577_98401C.1.pep
KKETPKKRNQGKLFFPKADRVVKXLAEWAPKSPRVFAQGSLLALKQLPLAXKKLPGKKTLSPRLGSKGDWPNIDPPGWAPESDPPPPNI

SEQ ID NO: 367579 - protein, 210 aa, Zea mays
  Clone ID: MRT4577_98402C.1.pep
MISPAHLAFAAAFLLVVRSSAPGAAAARPIFDGKPSPSEATATARWLAAQNTWGVLSTISSDLSGAPFGNVVSYSDGVPGEGRGIPYFYLTTLDPSARDALEDERTSFTLSEFPLGTCGEIDPENPTCAKLTLNGKLKMVDLQSSEADLAKSALFTKHPEMKDWPKNHHFKIFKMEIENIFLIDWFGGPKPISPSQYLEFGRNQGSLMYS

SEQ ID NO: 367580 - protein, 173 aa, Zea mays
  unsure (1)..(173): unsure at all Xaa locations
  Clone ID: MRT4577_98403C.1.pep
MISPAHLAFAAAFLLVVRSSAPGAAAARPIFDGKPSPSEATATARWLAAQNTWGVLSTISSDLSGAPFGXLLVSLLQTAGIYSFLTGELDSWLLLCXNVVSYSDGVPGEGRGIPYFYLTTLDPSARDALEDERTSFTLSEFPLGTCGEIDPENPTCAKLTLNGKVLKITSMIR

SEQ ID NO: 367581 - protein, 82 aa, Zea mays
  unsure (1)..(82): unsure at all Xaa locations
  Clone ID: MRT4577_98404C.1.pep
CSIGPERSTISGSVWASGPGKHYAKSYGVSGQAFFLYGKCVRGSSRGPVLPVCTYDPRNMSXRCAVSSREIPPRNTSGDGCP

SEQ ID NO: 367582 - protein, 146 aa, Zea mays
  Clone ID: MRT4577_98405C.1.pep
CHSASQSAHGGIVEGLHQYMCFAASSRRSRQRPPGRGPWCSDYGNRDARRMCRDRETLPYTMYVVQLSTPPWSWFGVSAAAIRMLSIRNAAGSRLPALRVVGASSAQDPALRGVKMDKDNSRIATQCIVMVIMLVSPGVARRSRVH

SEQ ID NO: 367583 - protein, 76 aa, Zea mays
  unsure (1)..(76): unsure at all Xaa locations
  Clone ID: MRT4577_98406C.1.pep
ANLVANMENVLPFNQLDMXNYVGDLQKGLKFLNPLAGHNPLVAAFLEKQQFVPSNRFSLMNPVLSRQPPIVGGAII

SEQ ID NO: 367584 - protein, 30 aa, Zea mays
  Clone ID: MRT4577_98407C.1.pep
IYFLFKSLQSIIYPIPIYYLILQIILYIST

SEQ ID NO: 367585 - protein, 73 aa, Zea mays
  Clone ID: MRT4577_98408C.1.pep
STISFTMWIHQLGRGEEQRQNCVWPRTWAHPSLMHHGYSAKATAPSLPPKVRRNTYQNLLPACDCDNAYACNR

SEQ ID NO: 367586 - protein, 40 aa, Zea mays
  Clone ID: MRT4577_98409C.1.pep
IYSLQMKKIVRHFLLRQFSLHLSDLVGTVIHGHPDVHWTT

SEQ ID NO: 367587 - protein, 101 aa, Zea mays
  unsure (1)..(101): unsure at all Xaa locations
  Clone ID: MRT4577_9840C.1.pep
RANQYTAALYLILLQALIRRRLGGSTDQKVVDENLAMLKNVLEVYEARLIKCKILVGDFLSLVDVNHVSVTVXQSATIYAYMLNAYPHVKAMXDGMMERPI

SEQ ID NO: 367588 - protein, 112 aa, Zea mays
  unsure (1)..(112): unsure at all Xaa locations
  Clone ID: MRT4577_98410C.1.pep
SPSTRVPGALRRRGPLGSSRTPGRPPWQEAGPCGQPPAHVGPLGTGTGSPKRTPGPXGPTPSPGPPTTTPFPPPPPLRGGWSRRRRSSSAPAHCSGSTAPPPPPTRPPTRPR

SEQ ID NO: 367589 - protein, 74 aa, Zea mays
  Clone ID: MRT4577_98411C.1.pep
WASVRVGRLFLWDSRTKGLLKVVNIDGQVDTRFDILSAQDSYSYETKQTLFSPRKEKARSPVGFLQRSRNAFVG

SEQ ID NO: 367590 - protein, 533 aa, Zea mays
  Clone ID: MRT4577_98412C.1.pep
MGGDPGKVIRNVKGAAQKYLGVGFLLGFFLVLLTYFTVSEQFAITAPNAVRRSSPGHAHTSGSPITSAVEEKRQQPPAIEEKPPKPELAPEEKPPKEEKPPRVDVEGPHAETEEDQKKPVPDDDGRSSGTGGGDGIATESAPAKKPACDIQGPWASDVCDIDGDVRIHGSAGTVLIAPSIESGGNPNPQEWRVRPYSRKHQGGIKEVTVRELASSADAPACDVRSPVPAMVLAMGGLTGNYWHDFSDIMIPLYLQAARFEGEVQLVVENIQPWYVGKYRAILRRLSRHDIVDMDRDDRVRCFPGAVVGIRMHKEFSIDPAREPLGHSMPEFTAFLRETYSLPRAAPARLAGADGEEDERARPRMMVISRRHPRKLVNLDAVVALARRVGFEVVIGDPPFNVDVGEFAKEVNAVDVLVGVHGAGLTNSLFLPTGAVFIQINPYGKMEHIGEVDFGIPAVDMGLKYIAYSAGVEETTLVDTLGRDHPAVKDPESIHRSGWGKVAEYYLGKQDVRLDLQRFEPVLRKAMQLLRDRE

SEQ ID NO: 367591 - protein, 148 aa, Zea mays
  Clone ID: MRT4577_98413C.1.pep
RRVGFEVVIGDPPFNVDVGEFAKEVNAVDVLVGVHGAGLTNSLFLPTGAVFIQINPYGKMEHIGEVDFGIPAVDMGLKYIAYSAGVEETTLVDTLGRDHPAVKDPESIHRSGWGKVAEYYLGKQDVRLDLQRFEPVLRKAMQLLRDRE

SEQ ID NO: 367592 - protein, 65 aa, Zea mays
  Clone ID: MRT4577_98414C.1.pep
MGGDPGKVIRNVKGAAQKYLGVGFLLGFFLVLLTYFTVSEQFAITAPNGEFNCSDDMGLVPAENP

SEQ ID NO: 367593 - protein, 101 aa, Zea mays
  unsure (1)..(101): unsure at all Xaa locations
  Clone ID: MRT4577_98415C.1.pep
PHTYMKVNVPEESRNGETSPRTKITWMKAEDSSKVSGGTPIKIEDPDQFVPXNTNPNEVLEKRNKIREQDRYDLKTAGPQSQLLAGIVVDKPPSTMQFEDD

SEQ ID NO: 367594 - protein, 54 aa, Zea mays
  Clone ID: MRT4577_98416C.1.pep
HPHTSVFKVSSYLTPTLSFEYSISTTDTLSNYYLHPLYPYPLLLSTLLLFHPSY

SEQ ID NO: 367595 - protein, 78 aa, Zea mays
  Clone ID: MRT4577_98417C.1.pep
RPASLTAKCCIQLIAPKRTKHEYTNGADTEAWTQRERLVCPCTEPRTCKPRPLRWSSAVGAKGYNADLLDVQYGCLNF

SEQ ID NO: 367596 - protein, 49 aa, Zea mays
  Clone ID: MRT4577_98418C.1.pep
TRYSTKDCDGRLTPKSNYISSVYLLRRVVHLLVAKRGGSSGKKLPATFI

SEQ ID NO: 367597 - protein, 58 aa, Zea mays
  Clone ID: MRT4577_98419C.1.pep
KETRYFTEWNYLFRIAFVQWYLTVPINWSNSWLCSIPICYLTTIFHASSPSITKLQQN

SEQ ID NO: 367598 - protein, 96 aa, Zea mays; identical to SEQ ID NO: 367575
  Clone ID: MRT4577_9841C.1.pep

SEQ ID NO: 367599 - protein, 174 aa, Zea mays
  Clone ID: MRT4577_98420C.1.pep
ALEAHQSDYKDHDELVPSLDDKKSLLKNWPFMSSLITYCVFSFHDMAYSEVFSLWAESDRKYGGLSLSSEDVGQVLSVTGVSLLIYQLSVYPRTNKILGPIKTSRVAAVLCMLILLGYPYMTHLSGTALSVVLNIASILKINLASTIISSSFILQNNAVPQDQRGAANGLSVTV

SEQ ID NO: 367600 - protein, 34 aa, Zea mays
  Clone ID: MRT4577_98421C.1.pep
KKKNPFGFRRQKAFKIAPHLVYTFYQWKRNKWVP

SEQ ID NO: 367601 - protein, 89 aa, Zea mays
  Clone ID: MRT4577_98422C.1.pep
MPLFGFSLFKKVVPGVSAQSDDDDELIDPQVTIRESCAPHCASLKAKLDECNARVNSRSATTETCTEELFDFVHCIDHCVSKSLFSKLK

SEQ ID NO: 367602 - protein, 94 aa, Zea mays
  Clone ID: MRT4577_98423C.1.pep
QIKHMLLMHLPAWHLLMLSTTRVPSTELTSHSPVRSDLKSSRQPSSTHKERSKLGVYVTTIRKAGRADRSNVATNDRTTSADKRLHNNDAYKEE

SEQ ID NO: 367603 - protein, 101 aa, Zea mays
  unsure (1)..(101): unsure at all Xaa locations
  Clone ID: MRT4577_98424C.1.pep
YVSSKEYLLHLNHFHKWRHDENKPDFLASPPRSLAGKQSNLLELRTEAAQEIGTMRVPRSGRRRQQKTEEPGVKNQDRGEEGKRNGTRRTRMKECPRXSLE

SEQ ID NO: 367604 - protein, 246 aa, Zea mays
  Clone ID: MRT4577_98425C.1.pep
MPVKVFGSPTSAEVARVLACLFEKDVEFQLIRVDSFRGTKRLPQYLKLQPHGEALTFEDGNVTLVESRKILRHIADKYKNQGYRDLFGPGALERASIEQWLQTEAQSFDVPSADMVYSLAYLPPDMQLDGRGVGGLPAATGTMNPAHRQKVEEMLQLFEKSRRQLGKLLDIYEQRLGEEAFLAGGKFTLADLSHLPNADRLAGDPRSARLMESRRNVSKWWDTVSRRDSWVRVKELQRPPSAEAPF

SEQ ID NO: 367605 - protein, 404 aa, Zea mays
  Clone ID: MRT4577_98426C.1.pep
MATTLTPTQRYAAGTLLALALRQAQIHQSEPLGSGPDDEERASSASGSSSSTISSTGSDTTSGAGLWTHDSRGLLRPVFRFLEIEPKAWAGMEETAASPDAAKHHIGAFISILFEEDGESSSDRLEQEIALAKAVDVMVMSLGSDTAPDENIKDERKYSTACTYATSESMEAGSSENLLGIVKLSLENVPVNEHRKMVLLYALLSACIADKPVSQEEEDRKSSHFRKGYDARHRVALRLIAAWLDVKWIKMEAMEVMVACSAMAAAKEQEQERENASPRSKWEKWKRGGIIGAAALTGGALLAITGGLAAPAIAAGFGALAPTLGTLVPFIGASGFAAMAAAAGSVAGSVAVAASFGAAGAGLTGTKMARRIGKVKEFEFKPIGDNHNQGRLAGRILVSGFAFR

SEQ ID NO: 367606 - protein, 334 aa, Zea mays
  Clone ID: MRT4577_98427C.1.pep
MAREGELPKEKPFRCSCQENISRESHQSVVARPTLNFTGKQVPQLHIGSRASSSFSMYQRTSAKPNPCLDSHDHLSAAKVAAESAVSLPSYSTDCISPSLQTQLPSPSNPILRLMGKDLMVMNNEESVHPQAPSSDYILRGNYEAPVGFMPPSYQHLGNSGFISMPPTAASHQIPLPSVQASGLVAPPLHSVSMMQPDHHSQQKSYRNIMPAMHHPTYMMKEVIVIKDSPERSRTEPQASMLFPPAPPPTLSIPNNTPPRPFYCLPPQIPILPRERAAGSMPVYANFGALAGVSPSSQESQTGVANPYMPNPFFVQSRTGYMNHPPVYYSQNLG

SEQ ID NO: 367607 - protein, 129 aa, Zea mays
  Clone ID: MRT4577_98429C.1.pep
GIIYYYSLYVNDRPLGKGTRDFVADMSIYYRGSKTDPPPGKAAPTSIGPDPQGLRLMVQYLQETYGNLPIYILENGYGSSNDTAHDNDRVDYLKSYIGSILTALRNGANVKGYFVWTSRDVSQYLTGYG

SEQ ID NO: 367608 - protein, 61 aa, Zea mays
  Clone ID: MRT4577_9842C.1.pep
HLELFKARSESVSLVAASTMVSSLQALATLVPGLSYIHAGPVLRLQSPAAEALGPTHLLHT

SEQ ID NO: 367609 - protein, 115 aa, Zea mays
  Clone ID: MRT4577_98431C.1.pep
GGGHFPGAGRGPTAVLSPLSGPRPSRGGGSPIKCSCRASGPACPCVGLSFVWVAVVGRYPRCWLWVFPVVWGCCAAGPVALPRGLLLLGHQKTNHRLPKRKKARRPSRVQLRTRL

SEQ ID NO: 367610 - protein, 84 aa, Zea mays
  Clone ID: MRT4577_98432C.1.pep
MQVKPRRPCRRSSDPPKRKKTVDICQHGKNTNFTVVLKLDTGSNGRIGIEHHSTSSKSAPVRAHRRPQPRRRGLGFTLRCGGRG

SEQ ID NO: 367611 - protein, 281 aa, Zea mays
  unsure (1)..(281): unsure at all Xaa locations
  Clone ID: MRT4577_98433C.1.pep
RVSQEAIQVDPHSSSLLQDLVHSFARCRYRSLHTVVMGEGVHPLEVQIRTKEMHLQAEYGFAAHWRYKEGRTCRHSFVLQMVEWARWVLTWQCEAMDKERTASSLGSGDAASARPPCPFPLHSEDCPYSYTRQCNHDGPLFVILLEHDKXAPALTGCTHGSPIACLCSVPAISDKVCGAVXMSVQEFPADSTVMDLMDRVGANSSRWSPYSIPVKEDLRPRVNREPIFDPNRKLSMGDVVELTPALPRRSLSGYREKIQRMYDRGGFALSAQGGGSRRCCQ

SEQ ID NO: 367612 - protein, 57 aa, Zea mays
  Clone ID: MRT4577_98434C.1.pep
IGRITRKTENTSRHRKTEPPSDCHQIMRRDLRRLSVALQIQLALDSCHPELHFPPNL

SEQ ID NO: 367613 - protein, 58 aa, Zea mays
  Clone ID: MRT4577_98435C.1.pep
VFAYEVREGVVLEYDAWQGAWVNVVGAGRAVRLALLVRRPRLAGGLELPVLARCGFLP

SEQ ID NO: 367614 - protein, 107 aa, Zea mays
  Clone ID: MRT4577_98436C.1.pep
DLLLFLSRSDLAIFVLDRATLSCCRIVCYLVNNLLHGLKLKSGKAPTTSRQLRHTDWIRSMIVLLIRFVEGSAPRSDLTQGAPPVRPVAAASEFLRFGIYHIKGGRG

SEQ ID NO: 367615 - protein, 80 aa, Zea mays
  unsure (1)..(80): unsure at all Xaa locations
  Clone ID: MRT4577_98437C.1.pep
PRVRGRVGGRVVAVPVENFKLLRSGDGXCRSTYTEYIISINPGDSSMRTSYITYIVKLRSNSLGTKFVIFITYPPYNGTS

SEQ ID NO: 367616 - protein, 63 aa, Zea mays
  Clone ID: MRT4577_98438C.1.pep
VVPAFHSGATASKRPGRDASTGAYSAAPDCDMEDESLHSMPITYCQGLASMNKLYPETQTFAS

SEQ ID NO: 367617 - protein, 76 aa, Zea mays
  unsure (1)..(76): unsure at all Xaa locations
  Clone ID: MRT4577_98439C.1.pep
GGRQMXLMSATLGGFVLFHSPSRREYNTSRGPGVARSIELPSVHMPSGYPPYTQERGLFDQDLPQNDMREQVLHAT

SEQ ID NO: 367618 - protein, 81 aa, Zea mays
  Clone ID: MRT4577_9843C.1.pep
TPPPIYPFFFFINLYPPIYPGPKPKESGEGENQRLTKCFKKTTRVGLSKNPRGRGDQFTLTQLAPPGEIKKFTPPPRVGET

SEQ ID NO: 367619 - protein, 87 aa, Zea mays
  unsure (1)..(87): unsure at all Xaa locations
  Clone ID: MRT4577_98440C.1.pep
MTQKQTLYKXGHDKNKTIPANRHGKGPYARDGKTAANPTKCPKDMIGRQGLTKLINQGNTLQTRNVVSIVGSHLHIRTASGVESQTK

SEQ ID NO: 367620 - protein, 94 aa, Zea mays
  unsure (1)..(94): unsure at all Xaa locations
  Clone ID: MRT4577_98441C.1.pep
CAGTGGEGXMGKGXGAKRHRTXMGDNIQRITNPPIRKLARRGGVKRISGVMYHETRDPLKILLVNVIRDAGSYNQHPPRKTENCMDVGYCLKCQ

SEQ ID NO: 367621 - protein, 77 aa, Zea mays
  Clone ID: MRT4577_98442C.1.pep
KTTGSVENQQGFQAYAKYCICLGVICKPNMASLKEGIASWTQQSPIVSYLLPNEQPCMYVTAHLYFEPVEQKCMSRA

SEQ ID NO: 367622 - protein, 64 aa, Zea mays
  Clone ID: MRT4577_98443C.1.pep
EVIGGGGGVVVVVDGIKDSAVEAGDLDPLGEHHEDIVVDEEGVLLGDDDGLELGENYHKSGIRL

SEQ ID NO: 367623 - protein, 100 aa, Zea mays
  Clone ID: MRT4577_98444C.1.pep
WLWSGLPVWSSVSPLAPVLGLWVCGWCCGLAPALHFSSPRACLVSCCGSLSFFPASFCSFALLCVSLCVLAAPAVLASPFRLPFASGVWLSLSAVSSVVS

SEQ ID NO: 367624 - protein, 72 aa, Zea mays
  Clone ID: MRT4577_98445C.1.pep
PTLCFISHLLYRELMREQLKEPRSGGVRGRILWTLYFCGWRLLQVYKSSQHWLVEHEHPLHALFYGNAILPS

SEQ ID NO: 367625 - protein, 54 aa, Zea mays
  Clone ID: MRT4577_98446C.1.pep
PPGVIKFFFPAFGVRCSPGLVRSTNFCQAFQLCFCPQKIFFILRVFNSPISGVG

SEQ ID NO: 367626 - protein, 120 aa, Zea mays
  unsure (1)..(120): unsure at all Xaa locations
  Clone ID: MRT4577_98447C.1.pep
MKGRCGSSCGCGKSCKCGQKNPGLQETRGVNQPTVVLPVVPPKKAAPHFGGGREVYNLGFFCXTCRRRCTCDRCNCWSHFLLANDLPKVYLALWCRLDNNKRGPAGWGTYFLPGPRVRER

SEQ ID NO: 367627 - protein, 89 aa, Zea mays
  unsure (1)..(89): unsure at all Xaa locations
  Clone ID: MRT4577_98448C.1.pep
MPNLLRQYFVYLPKCRFRQNLLLSLSQVRLCLDRQDYVRAXILSRGISPRVFDSIVQGALVDIPSLLELKXSIYYELXMTRYVMLLNLN

SEQ ID NO: 367628 - protein, 113 aa, Zea mays
  Clone ID: MRT4577_98449C.1.pep
FTADRRSPKPRSRTKQSPSRCTLRDGARILPRGNWVRRFRDSELILGAVQAEGSATMVFVARDTITAKIVPTGATESAQEMCSVSQWISLETNPTGRAHQSVRHQGTRSLLRS

SEQ ID NO: 367629 - protein, 336 aa, Zea mays
  unsure (1)..(336): unsure at all Xaa locations
  Clone ID: MRT4577_9844C.1.pep
MEGVELKGRALHASNNTIFMSTTNLRRRLHHGDVDGRKNEHVDISSADSLNEPLLGKSNDDNFGSEVYDPRKQDLWDDDMKKEQLHWSFLFSNLITQWAQWLASIIVSSGSIFGRLSXPSLXNQINPEYLSPLXTKXLKTLRQRSQMSFGSSRIKHQDDIGCVNDEVLEXRHAPLPGGVEIRCTLLCLNPNVFCDVSSEXQTGCDENVVIRNXYLKSVQILLXKEKGQRSDWEYPFAVAGINVSFMLVQMLDLKSSVPSSKYGIRFLELLGRDENAFDHLYCVAFRLLDAQWLVKRASYMEFNEVLKSTRTQLERELVLDDVLEVKDLPSYTMLDE

SEQ ID NO: 367630 - protein, 74 aa, Zea mays
  Clone ID: MRT4577_98450C.1.pep
PLILSYFILILKGGVLGAKGGQNRPGKAHKNQGTRRAPKRADHRPNGPGGGGNNARPKAQRRNGAQREGRPPTK

SEQ ID NO: 367631 - protein, 236 aa, Zea mays
  unsure (1)..(236): unsure at all Xaa locations
  Clone ID: MRT4577_98451C.1.pep
MVSGEKELLPDPVTHEGEHLLRDELLSKIMDKSSKLGDKVFSLRGRSIYDKHSNQVSFLDMHRQKVVDKLRRACSLVVEHLRSSQNHIAQEDRDGKIKLIIEWFTMLLYAFLEHMKCQRNRLDMQQSASRIKESQLKEETLQAARCGQLDQNFDQHIPSPDFEFAMEEFRHFREVVGSCYVDPAALVPESLDDNSAMEIMLVQSATDAEVIEEVLNRPTEVLVQGPAQKLLVHQXM

SEQ ID NO: 367632 - protein, 445 aa, Zea mays
  Clone ID: MRT4577_98452C.1.pep
FQGAEEDIIIISTVRSNGAGTLGFLSNLQRTNVALTRAKHCLWIVGNGTTLFNSNSVWQKIVKDTRDRGCFFNATDEKELLNAIFKPAVEYPHADNLAKHEQHGQNISDLSATDTIQQLACQFTPGSDLPPKFSITLNVGYTTRKFSSSSTLLNSSPLQLTATAVPNAEPASHGSSATGAVELPVTEDGRLVDGKISFQNTVRSTLIRIDHDPRLAFDFLAVATTREQAAPLTREQFKKHDRMVESPAPVTAEGSECCIRLNEQEQVAPPTKLQSKKRGRNVKDPAAATTGALKCSIGLDEIATRQQAAPPTPEQSKKRGRKSEPLPQVITEGLRRSSRLSEKGKHHQVAPSQEQAKKHGRKGATLSPVTTEALRRSSRLNEKGTHQQIALSIPEQAKKCGRKAKRLPRVTIEGLKRSKRMSRNNSEELADVDCNPCECYHKKPF

SEQ ID NO: 367633 - protein, 73 aa, Zea mays
  unsure (1)..(73): unsure at all Xaa locations
  Clone ID: MRT4577_98453C.1.pep
AASVGAESVSIYTVSQTRDIAWSTHAVSLDGRVQYTNQVDSDLTHLGNGKTVKXXKQLLILVFFLQNPSTYAY

SEQ ID NO: 367634 - protein, 62 aa, Zea mays
  Clone ID: MRT4577_98454C.1.pep
HFMHGMFGPSQSLPHQPWGVNGSARSMPTGRYAPVNTSYYGSNRLRWRVGTAGRSPPPHALA

SEQ ID NO: 367635 - protein, 100 aa, Zea mays
  unsure (1)..(100): unsure at all Xaa locations
  Clone ID: MRT4577_98455C.1.pep
IIFNKXTDGFLFLFLLLXVLPKPQNPRTQEKDIYQMPPTQIPYPSSFFKYLNAFTLFFNYNPLLTQKNDSGGLQNSLQSYTQLYSLTLPPITNLLYASHA

SEQ ID NO: 367636 - protein, 52 aa, Zea mays
  Clone ID: MRT4577_98456C.1.pep
RLAKQPPTAPLSVRASRLLSKKRTYGYARLLLAEAFSKGLGAKLQVFSTDII

SEQ ID NO: 367637 - protein, 123 aa, Zea mays
  unsure (1)..(123): unsure at all Xaa locations
  Clone ID: MRT4577_98457C.1.pep
MTILLKNRVRDKNARIHREYIRCSHXRHYCHCASALILASXKNMVHKDAVKNTQKNCVHEGYVLLKXYTQLMHMRSCLNHEYIDAVTSRDNRIYRQDPKGFTCQDDEARLEERPPTPRGLVPH

SEQ ID NO: 367638 - protein, 56 aa, Zea mays
  Clone ID: MRT4577_98458C.1.pep
SHVKDSCKDVWHSEIEFKVTSIEDAMTLHCMLFVSLGFLYIRPSFFFFFFFFFFFF

SEQ ID NO: 367639 - protein, 65 aa, Zea mays
  Clone ID: MRT4577_98459C.1.pep
PIFTVKKKKKKKKKKMNTTKLKRKGKTLLHVLINTYKKKKSPLRCHHCLRAKWRHWLLFFLTLSL

SEQ ID NO: 367640 - protein, 403 aa, Zea mays
  unsure (1)..(403): unsure at all Xaa locations
  Clone ID: MRT4577_9845C.1.pep
MSTTNLRRRLHHGDVDGRKNEHVDISSADSLNEPLLGKSNDDNFGSEVYDPRKQDLWDDDMKKEQLHWSFLFSNLITQWAQWLASIIVSSGSIFGRLSPFSSENQINPVYLSPLQVMXGKGIRLQLLVYNVLXSTFQEQRLDTLRHRLQISFDGSRIEHQVCITDVDWFSRLTSSHEXLINNLWALSLLXALRQLRRLAYPAREIPPLKSELWKEMGWQGNDPSTDFRSSCNLIVRRMCSXEKINPVDKHIXTDRIYXGGGLISLENLIFFARNYPNSFQMLLNKVQGQRSDWEYPFAVAGINVSFMLVQMLDLKSXFPVPNSPLHISADFTFCCLNCHIYAGVPSSKYGIRFLELLGRDENAFDHLYCVAFRLLDAQWLVKRASYMEFNVSILSTLILLFLF

SEQ ID NO: 367641 - protein, 120 aa, Zea mays
  unsure (1)..(120): unsure at all Xaa locations
  Clone ID: MRT4577_98460C.1.pep
MGESSKELLDLPSDPRPPASFIESLLAGREQQQQDKEGKRKLGASTDPLPKSQVIGKVKDFLGEIARANQKLQLDAQNKPPVEYDIEALTGNEEEYIEMDLLLGVADLHSXXAVEAAEAT

SEQ ID NO: 367642 - protein, 85 aa, Zea mays
  Clone ID: MRT4577_98461C.1.pep
NNPSASEGPHEQPKFSRPKKESKQQKEQKRKNTPPPPKKKKKKKKKKKKKKKKKKKKKKKKKKKKKKKKKKKKKKKKKKKKKKKK

SEQ ID NO: 367643 - protein, 188 aa, Zea mays
  Clone ID: MRT4577_98462C.1.pep
MGESSKELLDLPSDPRPPASFIESLLAGREQQQQDKEGNRKLGASTDPLPKSQVIGKVKDFLGEIARANQKLQLDAQNKPPVECDIEALTGNEEEYIEMDLLLGVADLHSEQAVEAAEATINGRQTSEMTFACSSSDSEDDSDDSDEDADDKPVMSDKDNKCESPDDAEMGPAKGKKPNKRQKIVVLN

SEQ ID NO: 367644 - protein, 57 aa, Zea mays
  unsure (1)..(57): unsure at all Xaa locations
  Clone ID: MRT4577_98463C.1.pep
TCIIHKKILSFSHPTIPQLXKIMHNVCFQLYTSLILFNNKHFLFFQKNKKNKIIKRL

SEQ ID NO: 367645 - protein, 276 aa, Zea mays
  Clone ID: MRT4577_98464C.1.pep
MSKGPVPFANIGKRAKDLLYKDYNFDQKFSLSTCSNSGLNLTATGVKINEDFIGDIRTQHKSSRTTVDVIIDSDSKVSTTVTVDEALTGLKTSFAFKVPDHKSGKLDLQYAHNRFSMNSTIGLTSTPLVELAATVGTSELAIGAEFGFDSTSAAVTKYNSGVGYNKSDFSASLLLADKGETLKASYVHLFNPTNGATVAAEVTHKLKTKENYFTLGSSHALDPSTLLKTRFSNSGKVGLLCQHEWRPKSLVTLSAEYDPKVVSAPSRIGVAISLKP

SEQ ID NO: 367646 - protein, 64 aa, Zea mays
  Clone ID: MRT4577_98465C.1.pep
IAHWPTNSCQSPEEALMLPIYNTVRCSMNKEILTNPEKNTRARKDIRHELSQLDGWAFVFQVYN

SEQ ID NO: 367647 - protein, 125 aa, Zea mays
  unsure (1)..(125): unsure at all Xaa locations
  Clone ID: MRT4577_98466C.1.pep
VFDKLKAQRERGITIAIALRKFDTTKNYXTVIDAPGYRDFIKNMITRTSHADRAVLSIDSTTAGCEAGISKDGQTREHALLAYTVDVRQMICCCNTMDATTPMLSRARYHQSVKEECSYLNKVAY

SEQ ID NO: 367648 - protein, 37 aa, Zea mays
  Clone ID: MRT4577_98467C.1.pep
GGHLWIRECVLDDYLSEVLMSVISLGIKPFHEEMGII

SEQ ID NO: 367649 - protein, 41 aa, Zea mays
  Clone ID: MRT4577_98468C.1.pep
ARGQCSEICGTNHAFMPIVVEAVTLKDYADWVSNQLILQTN

SEQ ID NO: 367650 - protein, 538 aa, Zea mays
  Clone ID: MRT4577_98469C.1.pep
MAESGESSPNSAAATDDTQHEMPEAGAAAAAVHAQPRPPPPPSKVRLMVSYGGRIQPRPNDNQLAYVNGETKILSLERPLCFPDFAARLAALVGNAADVRVKYQLPGEDLDALVSVTNDEDLEHLVHEYDRLHVHRHATASSAGSSRGGSAPRLRVFLFPVQSPPPPPQPAGILEPKVEQRQWFVDALNTVLLPSSKQDPPPVPPQQQKQEQESVFAQQSPPPQAKHEAVFVQQSPPQPQTVVQMQMPPPQHVVLAAASPDYLFGLDNGFVHPPAVKVKDPAGDPPAVRESVPVELPAKNEDRHPIPNPAGDNVAVSPAEYQRQIPGLEKLQVADNAAHQPPPPAPAPAPAPSLAPTPVPAALPRNGSDDSLTRGYPLATPTPNSSAEYYLPKFPEKPPVPPPPQSSAPPPPTYLQVQGRYTSVAPGSGADRGPVFFIPAPHGYFAATASPGATSYPAVYAVAPPSTAANGSAASPAASNATAYSPAPTQVAYDSNGRAIYYTSMLPQYPSAVNGMSSAGAVLGTEPVNPVAVKPTVS

SEQ ID NO: 367651 - protein, 316 aa, Zea mays
  Clone ID: MRT4577_9846C.1.pep
MSTTNLRRRLHHGDVDGRKNEHVDISSADSLNEPLLGKSNDDNFGSEVYDPRKQDLWDDDMKKEQLHWSFLFSNLITQWAQWLASIIVSSGSIFGRLSPFSSENQINPVYLSPLQEQRLDTLRHRLQISFDGSRIEHQDALRQLWRLAYPAREIPPLKSELWKEMGWQGNDPSTDFRGGGLISLENLIFFARNYPNSFQMLLNKVQGQRSDWEYPFAVAGINVSFMLVQMLDLKSSVPSSKYGIRFLELLGRDENAFDHLYCVAFRLLDAQWLVKRASYMEFNEVLKSTRTQLERELVLDDVLEVKDLPSYTMLDE

SEQ ID NO: 367652 - protein, 92 aa, Zea mays
  Clone ID: MRT4577_98470C.1.pep
DKACTGRGCQEGQTVRTHRTGIDGMAEQPSNRDRWPRQNTSINTMPHCTQFTAVYMSTLSIDQLSYTRTSIYGHPLAKQHLRFRPHRLDMFY

SEQ ID NO: 367653 - protein, 120 aa, Zea mays
  unsure (1)..(120): unsure at all Xaa locations
  Clone ID: MRT4577_98471C.1.pep
KKSGGGRXGRKGGEEGSKKGEEGGGRRGRXRGGEKGGAGNGRGGEKKKGGEGGRGXEKGGGGGGEXGKKRKGGGDSGGGGXKHXGGGGGEAGERGGGGSGGGXGGGGGARGGGRAKGGGG

SEQ ID NO: 367654 - protein, 74 aa, Zea mays
  Clone ID: MRT4577_98472C.1.pep
VQNKSWDLFLACRWSRFAGYVHPHRDRDKPTPKWSKLKTGLGKNTPKKSKEGLGVLLLYRLGRCPQKECNMGYF

SEQ ID NO: 367655 - protein, 137 aa, Zea mays
  unsure (1)..(137): unsure at all Xaa locations
  Clone ID: MRT4577_98474C.1.pep
CRRARLPSPSALHPPPSALASLRASYNRVLLPSMVRIPRDYHLPPPSRAPSGTIRASYSRALLRRRGSRTLESRQQIPQSSSGDRNRGGLRGRYYDEGEGERSGAAAPFIIIGRAPGGNGCRADEIEERVSGKFTXY

SEQ ID NO: 367656 - protein, 91 aa, Zea mays
  unsure (1)..(91): unsure at all Xaa locations
  Clone ID: MRT4577_98475C.1.pep
GSIFEGLLSNDMNVYAYIESCAHALICWMVCSGXLLDPRSXYDSCLGDLXSALSTLESGFHALRCLSLMQLSDFGTAVTLVQDAFSSGSSV

SEQ ID NO: 367657 - protein, 55 aa, Zea mays
  Clone ID: MRT4577_98476C.1.pep
TKNGIKKKPSSHKRGGRFLRQIYFGFSRTGGIWSGFKKRATEKKIWGTPKPLKKT

SEQ ID NO: 367658 - protein, 180 aa, Zea mays
  unsure (1)..(180): unsure at all Xaa locations
  Clone ID: MRT4577_98477C.1.pep
HFLXPVQNNLGRISHALSTFACVAGCIADYRFVSARTATGDPPLXTARVASRTARGGAGSLASAPYQASPQPAYSGRRRSXLCDPWPESLTSIYSQDPLRGVAGSATPLGTGTESATGTATGRPLHRRPWPEIYWPAARKEGEEGFLGDVSEMGNVEARTRITGFTLAVGGRAEAVVLAQ

SEQ ID NO: 367659 - protein, 90 aa, Zea mays
  Clone ID: MRT4577_98478C.1.pep
IGNRYKECRTQRTTSCQTKILVGKDVLNEIEQRRSSPSVIAKLMGIEVLPPSKVVNSRHQEFKDVFEVSEEPPEAVAKEKSQGLPSLKRR

SEQ ID NO: 367660 - protein, 61 aa, Zea mays
  Clone ID: MRT4577_98479C.1.pep
ASRHQAPMTSHAHVPPLLFSTPSGLHYCSFYHPGSGGTQGMDIFLFIHSRKNYFASNCLIY

SEQ ID NO: 367661 - protein, 60 aa, Zea mays
  Clone ID: MRT4577_9847C.1.pep
FMLTDPRMRRGRSAIAVPKFNTLGDVKQPLDCENHSITHLKPHALPTYFVRWRITHQARS

SEQ ID NO: 367662 - protein, 103 aa, Zea mays
  Clone ID: MRT4577_98480C.1.pep
DRGKARGKGTKRAPTKAQQGEGQPTGAPTRPKPARVTPKANATATQTQIQQTTNNQSPEHCPCPLPLTHGTYSASLSINGNHTETNSEETLKDPRLKDEANQN

SEQ ID NO: 367663 - protein, 112 aa, Zea mays
  Clone ID: MRT4577_98481C.1.pep
KGKKKGFQKIFHPNHCKPSSNPVPDRIFLKPYYILSWSHTLLLVELRLGLGDHNKGGQKGPGVEPQQFFRGGKKYHRPKQGIKLLAAEVGPLLGRCVVFLGQYTLSGRASAP

SEQ ID NO: 367664 - protein, 55 aa, Zea mays
  Clone ID: MRT4577_98482C.1.pep
QKKYGVCPFKKVNNVSLNQTQLCRTSQKMIKLPIMLLIIPPVKRSQHFNKLIWQS

SEQ ID NO: 367665 - protein, 57 aa, Zea mays
  unsure (1)..(57): unsure at all Xaa locations
  Clone ID: MRT4577_98483C.1.pep
GWAHGARRRVRKXAPGVYPSFLGTPPAAGRGLEGPPGWKFISGRPNRPTQQPWSISF

SEQ ID NO: 367666 - protein, 108 aa, Zea mays
  Clone ID: MRT4577_98484C.1.pep
VSYTVFCLIKHHFLHIKTPQLTDRYTTVVQNAHRSYRSATEHLGTLDRYRSEKANGAPFKRRTTKPVDRHTLRKGCRCNWPLGDRTATPPWLSEDRDGSATPRNQSGM

SEQ ID NO: 367667 - protein, 85 aa, Zea mays
  Clone ID: MRT4577_98485C.1.pep
HPMAGSEAYNGGPPLCICVLNKCAHEQGAPCHKKLWILMTDREKKNRTVPSKWYYPKTGTIRMGPKEGYTNSLGITHAHVYYSRR

SEQ ID NO: 367668 - protein, 67 aa, Zea mays
  Clone ID: MRT4577_98486C.1.pep
KTKTLEVERPDTTTNAKAKIQDKERIPTEQQRMITAGKQLEEGSTRADANIQKESTLHLVLRLRGGY

SEQ ID NO: 367669 - protein, 59 aa, Zea mays
  Clone ID: MRT4577_98487C.1.pep
LAARTPPTTRRLQHAVTCLHPPATPLLRPRTLLTLACALEFGERPRRGGGRRHPSQIRC

SEQ ID NO: 367670 - protein, 99 aa, Zea mays
  Clone ID: MRT4577_98488C.1.pep
DALQSIQGSYRRYAVITSEPRPTVNILTYTPLNHLILCAIVIDRDRPLFFVTLGVGGNTDASDGLVALETAPGEDRHLAKPTTQLTHEELSSSELLPNG

SEQ ID NO: 367671 - protein, 173 aa, Zea mays
  unsure (1)..(173): unsure at all Xaa locations
  Clone ID: MRT4577_98489C.1.pep
HLRFMMWIFVKTLTGKAITSXAQSSDTIDXNVKAKIHYNDAIPPXQKRFIFAGKQIEDGPTIADYNIQNVEHRSTTCASALRXRSMSYLLLKTXAGYRLLTPHTVTDSSXPCDDVKAWILYKEGIPPHQQRIIFARKHLDDGRTLDDYHLQNESTLHLLLRLIRGMLIFAQTL

SEQ ID NO: 367672 - protein, 88 aa, Zea mays
  Clone ID: MRT4577_9848C.1.pep
ETRIVYDSNDPVMEVGSLYASMTEFRLAMRQYAIDKEFELGIKASTTKKYRGYCRGGGCLWSINARIERDGSPTIIVCFLFISRTYLI

SEQ ID NO: 367673 - protein, 89 aa, Zea mays
  unsure (1)..(89): unsure at all Xaa locations
  Clone ID: MRT4577_98490C.1.pep
NQGCRVVKKKNEVPGKVPVSFIRRSEGSETSENEINLFVAKEVVFKKRNKXIFFGYSNQKNPSGNIFRKALRAWLAGGIPSSAPPQSKS

SEQ ID NO: 367674 - protein, 107 aa, Zea mays
  Clone ID: MRT4577_98491C.1.pep
SQNTQFTSGVRTNHTSHRSLKKMADFRPSLQLKRICVAMVYCRPLMFWLPLPACPDRQPGDGSGRYVSTYMNDKGQKSALAKKKWHRYCTTRVTWRTNAPLSVSSVT

SEQ ID NO: 367675 - protein, 56 aa, Zea mays
  Clone ID: MRT4577_98492C.1.pep
MSDGTATCIDIILAIILPPLGVFFKFGCGAEFWICLILTFFGYLPGIIYAVWVITM

SEQ ID NO: 367676 - protein, 54 aa, Zea mays
  unsure (1)..(54): unsure at all Xaa locations
  Clone ID: MRT4577_98493C.1.pep
RXXTXTKQAAFXPNXXLVLXQVNDDXLRXXPAXXSGXXXGHWFRTYPLVPIIXX

SEQ ID NO: 367677 - protein, 94 aa, Zea mays
  Clone ID: MRT4577_98494C.1.pep
NFSPSFNTPPYKEKFGPPRDRAGIFGVKQGVAKGSAQRSGEVFLIREKQFARAKLFGPKVPPPPPCWDCALGLRKLFKFLAWPPKFKSLMGAES

SEQ ID NO: 367678 - protein, 45 aa, Zea mays
  unsure (1)..(45): unsure at all Xaa locations
  Clone ID: MRT4577_98495C.1.pep
RAKNAREAFXHFGFGPHSGKKPYVESKGRKFERARGRRRSRGFKV

SEQ ID NO: 367679 - protein, 81 aa, Zea mays
  Clone ID: MRT4577_98496C.1.pep
ISPKGLPDQVQFLSVPPMKPSSKGSTSTPWGRLKNKKGPQMVAPQNKGLFLVPFLCPPQGYRDNNPGPNFWRPPNRNCLSP

SEQ ID NO: 367680 - protein, 87 aa, Zea mays
  Clone ID: MRT4577_98497C.1.pep
FAWLNSNVSTLMFYLEYVRRTNARSAGVSRKATTTRALRTYSILCDRWVVSCPPTLPCRRYTNWMGHHTAPTIPPVTPETTIKSGES

SEQ ID NO: 367681 - protein, 56 aa, Zea mays
  Clone ID: MRT4577_98498C.1.pep
WSLNRQGVPHSSLMLMKVIGPECSHHLESVRLLNCCAHKNIVNVGAQPKKYSEVIQ

SEQ ID NO: 367682 - protein, 48 aa, Zea mays
  Clone ID: MRT4577_98499C.1.pep
GERPLIRRIYITASLIYDAMCSSSFLASSSLSCANDPVLDVALPHERA

SEQ ID NO: 367683 - protein, 112 aa, Zea mays
  Clone ID: MRT4577_9849C.1.pep
LGARPLAEGRTRIFSVVRGWLRRAKQLIDDDDDDDACLGNRRSAGASAKKPIAARFHPSAPNSVVLLNSCAWIKITDREFEYRENVQCFGLLNCYAQTMSRTLLLSQHSCHF

SEQ ID NO: 367684 - protein, 50 aa, Zea mays
  unsure (1)..(50): unsure at all Xaa locations
  Clone ID: MRT4577_984C.1.pep
SGGCDSVYHVGPDGLKKLSGDDXGELEYRXYPVQKTPVXQGIADAPNASG

SEQ ID NO: 367685 - protein, 375 aa, Zea mays
  Clone ID: MRT4577_98500C.1.pep
MALIMQESSSHDLLQAHDELLHHSLCFAKSLALAVALDLRIPDAIHHHGAGGATLLQILAETALHPSKLRALRRLMRVLTVTGIFSVEQPPAGGGDNSTVHTSDDEAVVVYRLTAASRFLVSDEVSTATLAPFVSLALQPIAACPHALGISAWFRQEQHEPSPYGLAFRQTPTIWEHADDVNALLNKGMAADSRFLMPIVLRECGETFRGIDSLVDVGGGHGGAAAAIAAAFPHLKCSVLDLPHVVAGAPSDGNVHFVAGNMFESIPPATAVFLKKTLHDWGDDECVKILKNCKQAISPRDAGGKVIILDVVVGYKQSNIKHQETQVMFDLYMMAVNGVERDEQEWKKIFIEAGFKDYKILPVIGDVSVIIEVYP

SEQ ID NO: 367686 - protein, 382 aa, Zea mays
  Clone ID: MRT4577_98501C.1.pep
MGKASKGSRKGKKAWRANIGTDDIDDFFEKQTRDAHAGTAAIPSLPSDSLFFVDKPATSASTSAAGASDTTTKDIPVKRKIEKKREKVLYHESVLKRNPFVQPIPSSVPGKKDKKIKKKKLQETQGEKSVPMENDSVVKNFDIWAVDGKGDSKAKKRSTISVIPAVEVEPAGCSFNPPFEAHQDSLAQAVADEKRKEYMKELGPTPVPLIVPGEAIAEEDKFFLDAGEGDEDEDAAENGDQDADTSIGQRKNTTKRVTRVEMNRRARRKERLRAEAKAKKMENILKEIDSLPNIMDEIAKEDKEKEKRHKRRTVVKEERRKSGPPRLGRHKFEPAPVQVLLTEEISGSLRKLKGCCNLARDRYKSIEKRGILAPSKRISKRR

SEQ ID NO: 367687 - protein, 140 aa, Zea mays
  unsure (1)..(140): unsure at all Xaa locations
  Clone ID: MRT4577_98502C.1.pep
MALMQESSSQDLLQAHDELLHHSLCFAXHARAHRHKSLALAVALDLRIPDAIHHHGAGGATLLQILAETALHPSKLRALRPGIFSVVEQPPAGGGDDSTVHTSDDEAVVVYRLTAASRFLVSDDVSTATLASFVSLALQP

SEQ ID NO: 367688 - protein, 96 aa, Zea mays
  unsure (1)..(96): unsure at all Xaa locations
  Clone ID: MRT4577_98503C.1.pep
PAVSRECVKILKNXKQAISPRDAGGKVIILDVVVGYKQSNIKHQETQVMFDLYMMAVNGVERDEQEWKKIFFEAGFKDYKILPVIGDVSVIIEVYP

SEQ ID NO: 367689 - protein, 143 aa, Zea mays
  Clone ID: MRT4577_98504C.1.pep
MLSFSLVRKKTPRAPKKPPVSPRGVAYFFFLLARRFSPLEGGYFAPRHLCGFVSFLGPPGFTFFASGWFFLCSCEGLTFLLREHFFSFFPRVFLFPPIGKGGPPGGTRWFFPGWPPRSPWIPPRVLKKKKKKKKKKKKKKKNK

SEQ ID NO: 367690 - protein, 181 aa, Zea mays
  Clone ID: MRT4577_98505C.1.pep
LGKNPGGKILSSQVFFFQKKGFPFLVFPPEGFFFPPQGVFFFFWGGFFPNFFSRPKQLWPLKSFVALVNSGFFFGPPRKFFFPLPKRGVFTKNAPIKCGCSRFYWCLREKKRIPLFPAGGALFGAKNKKDSTKNVKKIILETITIKKNKNNKKTIEKRNKKQKGRPVLRIPKAYDRVHATS

SEQ ID NO: 367691 - protein, 60 aa, Zea mays
  Clone ID: MRT4577_98506C.1.pep
LFIKLSVLATYSFSITRLFNRLWDVAFTLFPSRVRLMPSTRSSTCIFHVRVMHRTLVVCV

SEQ ID NO: 367692 - protein, 84 aa, Zea mays
  Clone ID: MRT4577_98507C.1.pep
ALGFGFINNHSSPLSIFIQFPVVIVAFNKWSFFTSVLFNFFCYTCLFSFQSSFALFHVPGLVETSCCYNIYNLFYLKKKKKKRP

SEQ ID NO: 367693 - protein, 89 aa, Zea mays
  unsure (1)..(89): unsure at all Xaa locations
  Clone ID: MRT4577_98508C.1.pep
NFGGFLKFPPDSPIQHLPFKNPPWPQYFNHREILTQKPGRVKFSQRVLFSPSAPQENFMGVPLGWGEKTNTGKTKFFXSPPWEKTTLPS

SEQ ID NO: 367694 - protein, 84 aa, Zea mays
  Clone ID: MRT4577_98509C.1.pep
FLEVGWLLLPLRIGFGFSEVLRTSASLVTRIEMTKADVEYRCFVGGASTLGHEATTTRPQCTLPRYGGWALRSPKNRPGTGQTR

SEQ ID NO: 367695 - protein, 43 aa, Zea mays
  Clone ID: MRT4577_9850C.1.pep
TRFALKIYNLNQVQWQDRLYRKSIDFYSSIQNHFLLKKKKILK

SEQ ID NO: 367696 - protein, 54 aa, Zea mays
  Clone ID: MRT4577_98510C.1.pep
SMPMRRTRCVVFAPVHQCVQWQSCSCVSVWVIYHPQSCVLSISGGSSATSQCAL

SEQ ID NO: 367697 - protein, 103 aa, Zea mays
  Clone ID: MRT4577_98511C.1.pep
QNRRSTRPPKGATTKRTPREGKIEGRRDNPPGRSPEGSISNTINQHEKITTAPPPQRTYPQTHDITIDRGSCPLFPKWKTGNEKKIKQRNKANNRKRRTKMEG

SEQ ID NO: 367698 - protein, 55 aa, Zea mays
  Clone ID: MRT4577_98512C.1.pep
QFRSTDPLSTYEYGNLFKQVNRKCSSSTRLHDALYCVYFVAQPPSGNQPCLVNST

SEQ ID NO: 367699 - protein, 145 aa, Zea mays
  unsure (1)..(145): unsure at all Xaa locations
  Clone ID: MRT4577_98513C.1.pep
MNAPDRFELFVIPEGKKKVEMEVDTKIPNAATFIVEREXHTLGNMLRGQLLKDPRVLFAGYKVPHPLEHNFIIKVQSVPGTSPGKALKDATSELISEINALKNKFDMEVIRHRTFEDAKASQSNYGAVESMNPMETHHAGMDVDF

SEQ ID NO: 367700 - protein, 55 aa, Zea mays
  Clone ID: MRT4577_98514C.1.pep
VIPLWRKNKTVSSQSVMISGPVWNAGVFIFPIPAPPLFFSGKLNSSLQNSCMIPP

SEQ ID NO: 367701 - protein, 62 aa, Zea mays
  unsure (1)..(62): unsure at all Xaa locations
  Clone ID: MRT4577_98515C.1.pep
FSDRDCVRGRHSRPDRTIRLGPLSPMNGASIAQISPSVHGGAPVXLFSFFXFVFFFFFXFFL

SEQ ID NO: 367702 - protein, 77 aa, Zea mays
  Clone ID: MRT4577_98516C.1.pep
IPGLSFQVAQSAAKKVWLVAPGGGGNGEAIRLGLIRVHSYGPKGRKQTRLKKAFPFSEPTRSFNTKDQKKPCSLTCL

SEQ ID NO: 367703 - protein, 75 aa, Zea mays
  Clone ID: MRT4577_98517C.1.pep
FFFFFFLVGVLFGCGIFFFFLSHFFFFILVSYFFFYFGETKKQTGFDLQQRNPPPFNPHVGGSACIIGGCIINNP

SEQ ID NO: 367704 - protein, 87 aa, Zea mays
  Clone ID: MRT4577_98518C.1.pep
FYFPFHSIQKKHRGKDYHSYPHPYLSYFQNQYSIFTFLIHIYPLLDGSQNSYKHKNPIFPIYHSSLPFSSFTILLQSFHFATFFYLS

SEQ ID NO: 367705 - protein, 92 aa, Zea mays
  Clone ID: MRT4577_98519C.1.pep
KAPYHPPLIKEGFKKEEKRPQNHSAQWKESQNPVVTPGGAPQKKRPGTLRGGAPQKKMRKIERGEKNLLPPGFEGRKEGFVPGYPLGPSLFG

SEQ ID NO: 367706 - protein, 37 aa, Zea mays
  Clone ID: MRT4577_9851C.1.pep
LHLHTDIDSSYSLTSYYHGPGLIHQYHHLLQQFQPYK

SEQ ID NO: 367707 - protein, 106 aa, Zea mays
  unsure (1)..(106): unsure at all Xaa locations
  Clone ID: MRT4577_98520C.1.pep
PAXXXGPLAAAPPASXGPXVIXLPCSLXESXXGCGALHGGNXPPPARPEGAGGXXPTGVGGGXRLGRAPRXGPGXVERLGARXMAAXXPRRAXGXGGKREEXXRGG

SEQ ID NO: 367708 - protein, 40 aa, Zea mays
  Clone ID: MRT4577_98521C.1.pep
GPNLYAIQNSLHSQLIPNFSTRGNEKPASCTTRPCYSAST

SEQ ID NO: 367709 - protein, 78 aa, Zea mays
  Clone ID: MRT4577_98522C.1.pep
VVRATIVSSPLSLVPPDVVAEVEVESSRVDEFNASVWKDERLFLPLAPKYSNRSSPSVSELVTRVLWLYGPIVGTVID

SEQ ID NO: 367710 - protein, 213 aa, Zea mays
  Clone ID: MRT4577_98523C.1.pep
MADAVLFSRKASASAAVVVLAVAVVTMACLAAPVAALVPYGRAGGGLWDLMLLDDPFRVLEQSPLAASSVPRASLDSTSAAGVALARCDWKETPDAHVISVDVPGVRREDVKVEVEENSRVLRVSGERRADEEKEGDRWHRAERAAGRFWRRFRMPAGADVDRVSARLENGVLTVTVPKVAGHRGREPRVISIAGGDMGGVDAAEVMASKAEM

SEQ ID NO: 367711 - protein, 128 aa, Zea mays
  Clone ID: MRT4577_98524C.1.pep
EVADLKLLVDQCKSNPSIIHTPSLSFFKSYLLSLGAQIPTDPRTDRGGVKMEEPEQHSDDKKPYFSNEEDDDIIESDVELDNNGVVEPDNNPPQKMGDSSVEVTEEKRDAAQSEKLKAMDAISGGKLD

SEQ ID NO: 367712 - protein, 62 aa, Zea mays
  unsure (1)..(62): unsure at all Xaa locations
  Clone ID: MRT4577_98525C.1.pep
FATRQLVTIFXAPNYCGEFYNAGPIMSVNETLMCSFQILKPARKVLGGSNKNKFGFKLSKGW

SEQ ID NO: 367713 - protein, 133 aa, Zea mays
  Clone ID: MRT4577_98526C.1.pep
SAGAGSPPKYWSPPPKTGVFGPAAVDPNQLGVPPDPPPPNSVSPGGPVLAQKVWFRPLEDVEKPPPFALTAPRPPDGTLPAPPFYTRAAAGRESPGNVMLGPVIRPTRKCVGLLCPGVVISVIQVLAVPGLGL

SEQ ID NO: 367714 - protein, 88 aa, Zea mays
  Clone ID: MRT4577_98527C.1.pep
FSSGGSPLNEYLEQALDALMVLHQGRHCNRSFGEFNGSDNGDELLDYVWINDAIESGVHKHAANVGCRGLRSARAWADPDQDLDGTEL

SEQ ID NO: 367715 - protein, 64 aa, Zea mays
  Clone ID: MRT4577_98528C.1.pep
ANRPEEYSKGGKLVIETAFCPLVEVTAGPTNFILTPFINMLPLIYFEFFQNYKYMSPLIFFQKL

SEQ ID NO: 367716 - protein, 120 aa, Zea mays
  unsure (1)..(120): unsure at all Xaa locations
  Clone ID: MRT4577_98529C.1.pep
FRLAFRMFRATFXAVCEELGAFAPKEGTMLRPARRERKRVNECMGGLATREPLQLACKHLRLGMCSXHKLVLEEYTSNKDVLMHQEMQGPEAPGAHFAESGRFEDAGGIPDIVGAMDNTH

SEQ ID NO: 367717 - protein, 82 aa, Zea mays
  Clone ID: MRT4577_9852C.1.pep
AWGPLSYPNLQVPPGVAPPSPVRAPGATPTARERQRGRERERMRWAKETNGGAGTRKRPGWCWWPDGSWLARLGGRRWLAPL

SEQ ID NO: 367718 - protein, 24 aa, Zea mays
  Clone ID: MRT4577_98530C.1.pep
YPLSCLTPVQSFTVALNDSALPAH

SEQ ID NO: 367719 - protein, 134 aa, Zea mays
  Clone ID: MRT4577_98531C.1.pep
WDPRGRPGRARRPPTSTLASSTRSAASLAVAVAAAAAAPSSSFIVWISMFSLKEKRFFCVSWSVLDVFVFVSFSVPMCELVFDRSKVGETVAFERTGWQPIALVPSRFRCGRREGRHRLWISVCSVLSFAHHVP

SEQ ID NO: 367720 - protein, 117 aa, Zea mays
  Clone ID: MRT4577_98532C.1.pep
IRDYGGHGRESADQTKSRSKRGGSTGASKRDSQIRAKTRLGLPMTTVNTKENCVALPSSHSEETNLKSENDKDLFGKPVCHLARVHGVRRMGRSRQRSRADAGSLYARNGTEMAREQ

SEQ ID NO: 367721 - protein, 485 aa, Zea mays
  unsure (1)..(485): unsure at all Xaa locations
  Clone ID: MRT4577_98533C.1.pep
MAKPVSIQVWNPSGKYRVVSTKSMPGTRWIRLLTDNDCRLEICTEHKTILSVDDILALIGDRCDGVIGQLTEDWGDVLFSALKRAGGTVFSNMAVGYNNVDVEAANRNGIAIGNTPGVLTETTAELAASLSLAAARRIVEADQFMRAGLYDGWLPHLFVGNLLKGQTVGVIGAGRIGSAYARMMIEGFKMNLIYYDLYQATRLENFVTXSKNATYLYHACHWHRYILICLLDLCIALLPPAYGQFLKANGEEPVTWKRAATMEDVLREADVISLHPVLDKTTYHLINPERLAIMKKEAVLVNASRGPVIDEAALVEHLKANPMFRVGLDVFEVLRSIHRIEXDVDDDQYXNLIDKKLLGXCICSIHRHHQQDEPYMKPGLADMKNAVVVPHIASASKWTREGMATLSALNVLXVSMIRHAYMVIITSSYXWIENWQLLVQGKIKGYPVWGNPNQVEPFLQENLTPPPACPSIVNAKQIGLPSAKL

SEQ ID NO: 367722 - protein, 33 aa, Zea mays
  Clone ID: MRT4577_98534C.1.pep
LTRVLLCHCVFTPSTSDVTYVLGHLPCQSGTEP

SEQ ID NO: 367723 - protein, 293 aa, Zea mays
  unsure (1)..(293): unsure at all Xaa locations
  Clone ID: MRT4577_98535C.1.pep
SQIDELEDFXLTKPANSAIGHPQVLKHEGNGHYPSAATASFMDWTEMGHCKRGNQGAFDSMFTSSQYRQPEIDEKAEVCAHETESTDEEKRLENEQIQKEHKEEQIRAEREMEEELERERENVRQREQEEQRRREKERVARQAVDKAIREARERAAAEARMQAEKEARQRAERAAVWKAAKEARERAAVEAKERAAKSAAEAKEREAAEAREXLQQNQGKGMPKLPADARERAARAAAEAREKETAEFQEKATAEARAKAERAAVEKAAAKARWEAERAAFERVATEVKQKGF

SEQ ID NO: 367724 - protein, 116 aa, Zea mays
  Clone ID: MRT4577_98536C.1.pep
PLRISLEPAPFESSVWFPWLYIWSTYKSLVELIVSMCLLTVPMADIVWITRFTCRGIDRSSCQRALFSLCSAWCREIASYKHTSPAAAQAIRRAGRSYEPWQCHRQLAWPSRVHNT

SEQ ID NO: 367725 - protein, 238 aa, Zea mays
  Clone ID: MRT4577_98537C.1.pep
GMSNLDSATPAAAVAEIGTAERDSTTASVSALNGTHRCKKKKIKKNTTREQQELQLDLDSTLTAEAEGQVEAKGNEVEEQDATDAVASGILMEGTPKYYEEDSKVKVSLMPEKEANTTVVSVSESTPKHKKRRKKKNKIQGQLDSAKASSSVVSMDIIAADKSENCCTDVVGASGHADINMDPINGDDLSSAQSKANDADVLLKNKDGNKGDKNCAENSVLLQESSARRKRRRGKGSG

SEQ ID NO: 367726 - protein, 88 aa, Zea mays
  unsure (1)..(88): unsure at all Xaa locations
  Clone ID: MRT4577_98538C.1.pep
DPRARNERLQWRGYTVIHAQSSQPLLRTHPXDLAFDDTLICNIDYTLYLEHNPRAFVTEAFAFWDHTCHLEHEDSTQLLSADAIPRAR

SEQ ID NO: 367727 - protein, 81 aa, Zea mays
  Clone ID: MRT4577_98539C.1.pep
QTIVRITIPRLRKNSSKNSSPGVEPNPSNPFKGFPPKGPPPVSPLFFFPFPTPRPPKKNFLFPMCPSPPRFFPLTVCPKPP

SEQ ID NO: 367728 - protein, 52 aa, Zea mays
  Clone ID: MRT4577_9853C.1.pep
GFWVASGRWPSGVGSCRSFVCFGCGLSWGVRLSLRSCLGWDLRWGFVELFGY

SEQ ID NO: 367729 - protein, 83 aa, Zea mays
  Clone ID: MRT4577_98540C.1.pep
PFRKPFSRLSIPPVRPGKPRPLSPRVGGPPPPLGGNVPVLFAPPLFPVFPKKKKKKKKKKKKKKKKKKKKKKKKKKKKNQPTP

SEQ ID NO: 367730 - protein, 100 aa, Zea mays
  Clone ID: MRT4577_98541C.1.pep
VPRGRPGTRSYLAVVTIAVSRTDPPFLRGEKPCGFHLTTIQFPPWTAMTTIGFRVSLLPATQSDKALTPTRTHMPPPLARTMTDRLRKTKEGRCPDDHGE

SEQ ID NO: 367731 - protein, 87 aa, Zea mays
  unsure (1)..(87): unsure at all Xaa locations
  Clone ID: MRT4577_98542C.1.pep
KLEGLHVDHEMTINDPKLLMEMMDIQDAVNDPSDAQTLETIQSQVNAKXLKHDADSFQEAYYKKDLDRAXKXTQRMTYYERALEETV

SEQ ID NO: 367732 - protein, 122 aa, Zea mays
  Clone ID: MRT4577_98543C.1.pep
GSVHVAGSSVFKCVFLDILTPELHHVCMCVEKWSPWKKKRSPCGSCVHLVWNWSYGLKKKLSPKTTLVINLVVDPRCIPNVLVDSNDLFSNWGLPTSIFKTPCCARPHCCRSGGPQKIPKVR

SEQ ID NO: 367733 - protein, 76 aa, Zea mays
  Clone ID: MRT4577_98544C.1.pep
GRIFAIFSPPWAAFLALLLKGAHFALKTGGVFHLYWPLFYNPLFWETLVFPKFNPFALLPLFPTWLIRKGPPPRRL

SEQ ID NO: 367734 - protein, 202 aa, Zea mays
  Clone ID: MRT4577_98545C.1.pep
CPPPLASSSFLPASSALPSPVARTRQVPHQRRPSFPSSPHPPAPRSALRVPHQARAGIPASLVPPPNRKARSAASSALRVSRVGVTVMPREGEEGRSRGGDAGKAARHHRKARSGCSRGRGRKAARRRRRESLHLRAPAPSPDAADTILGPLARHQTPPSSLPQFATRPSWSPRRWRRALCASFLDRAIPCPARDAPRTTAS

SEQ ID NO: 367735 - protein, 130 aa, Zea mays
  unsure (1)..(130): unsure at all Xaa locations
  Clone ID: MRT4577_98546C.1.pep
GGGGHKKXRRGQADXNSXGAGRTTRRTSHKXPXRNPXQKSAXRXDPXXDGXGGAXXNXNXHSAXXGXRGXARGQXASDNGTTGXDDXPRAGQRRSGPQGDRXATKAQGEGXQXSARETNPAPXGSHGPGE

SEQ ID NO: 367736 - protein, 126 aa, Zea mays
  unsure (1)..(126): unsure at all Xaa locations
  Clone ID: MRT4577_98548C.1.pep
VLYLKAPVCMSGNLHAQIGDLMTLFNXIVLLVTGDNICXIDYNIIGXDYIDLDRDSXQTINVILAXKDEYPQNVHLIRXNYKARDINAKDYLRIECIEXIDEIERIWTWHRMNWLYNRLALDGLIQ

SEQ ID NO: 367737 - protein, 83 aa, Zea mays
  Clone ID: MRT4577_98549C.1.pep
LLGFLRAHASHVHMAGKNNMLSYALCLSDKHCLFSTWQRALSTALASLYLDSSTFPQLRRTNTNGYGNKQSSDELLKLSLGQV

SEQ ID NO: 367738 - protein, 77 aa, Zea mays
  unsure (1)..(77): unsure at all Xaa locations
  Clone ID: MRT4577_9854C.1.pep
SAFVSLMPAPRSAVTVSVVSRHGPAVHALLHCLRVXSWRRYPSQLAAGPNLAVLALLISLSLSFSLSLAMPTKEKVA

SEQ ID NO: 367739 - protein, 64 aa, Zea mays
  Clone ID: MRT4577_98550C.1.pep
TIVHAALVWLVNIWSAGYGYSISKINLLFSVKLHGGTYLINVQVSLCNGFTYPDSVLISKSLTF

SEQ ID NO: 367740 - protein, 135 aa, Zea mays
  unsure (1)..(135): unsure at all Xaa locations
  Clone ID: MRT4577_98551C.1.pep
HCRPQGHLHAFLHRHPNKRVXAHAAKRCIPQVLLALEYLHMLGLIYRDLKPENGLVRADGHIILWDLDLSLRCAVSPTLIKSSNHYAEPLRKNNHGYCAQPGCEEPSCINQPXCAYPTTFYGPGLIFCKDKKEQE

SEQ ID NO: 367741 - protein, 55 aa, Zea mays
  Clone ID: MRT4577_98552C.1.pep
TDSASILQAEFRLYFNYRIASNYKSNCPNNKEIIKAVTSDQLCHHPAWSTRCATG

SEQ ID NO: 367742 - protein, 55 aa, Zea mays
  Clone ID: MRT4577_98553C.1.pep
DAWAQTRAMIEFSPSTTMGVFFSSDYEHDYALPAPISLTHSLHPSHAADGCRHHT

SEQ ID NO: 367743 - protein, 82 aa, Zea mays
  Clone ID: MRT4577_98554C.1.pep
ECEHQPIVQPVRCLLHDNYGLALPQHTNAMIRTGKGHRKQDQKNAVCKNALRTNRGAGLSTVALELQLELDVLCGLLVFLGP

SEQ ID NO: 367744 - protein, 40 aa, Zea mays
  Clone ID: MRT4577_98555C.1.pep
FWFEKVSVFPFCFRFQCNTLLLSLPSFRLLVVGYTDVTTM

SEQ ID NO: 367745 - protein, 41 aa, Zea mays
  Clone ID: MRT4577_98556C.1.pep
AASVSSSQSKGVVLAHPPVRSPSSQCRGDLIEKVSMQADAW

SEQ ID NO: 367746 - protein, 87 aa, Zea mays
  unsure (1)..(87): unsure at all Xaa locations
  Clone ID: MRT4577_98557C.1.pep
SLAPHVVVVFFFYPRAVLECDCVGVATILVRGAVDELLVIVDVTGPGRLVAVVAKSSVVTAAGVCXTGLXXVTRHCYGRAAPXGSCS

SEQ ID NO: 367747 - protein, 112 aa, Zea mays
  Clone ID: MRT4577_98558C.1.pep
RTRRSREKAKAPQLKFTGLSGEPTAPAANGRQRNLRETCGPRQRSVGHTGLSGVPTELKVQRSGAPGKEGDRAPDNYCSCLVVHRTIQCATRQKARIAFRLDLQQLLAAMGL

SEQ ID NO: 367748 - protein, 101 aa, Zea mays
  Clone ID: MRT4577_98559C.1.pep
AIRRTTPHARAHAPATDRGPPPSTRPRSRTEKRARAVAHGVDAQDPVNLPVHARKEKGYHGTTLTRLREPRWRRRRHRSSTAMWRIGVPGIFLALAFFPGR

SEQ ID NO: 367749 - protein, 62 aa, Zea mays
  Clone ID: MRT4577_9855C.1.pep
LRSMGIVVIYGRLTPVPHVGDRVPALSLRRHGDDKVSRSNVLRSFKITRRVILPRTRGSAEF

SEQ ID NO: 367750 - protein, 75 aa, Zea mays
  Clone ID: MRT4577_98560C.1.pep
PFRQFQGGVFFSGYFGFQAGGFSEGGLSSVLWGFFFGSLIIGAFRGGRGSPGPPLGLFSFVSERVLFSSGCCLYV

SEQ ID NO: 367751 - protein, 74 aa, Zea mays
  Clone ID: MRT4577_98561C.1.pep
DALPVGLLLLVEDGVLVLGQHLLLTRHLGVPPLNSLGSLALTSKSSTEGIDDLVHGAQALRCRAFWGAERRHGV

SEQ ID NO: 367752 - protein, 192 aa, Zea mays
  Clone ID: MRT4577_98562C.1.pep
MPSVVTEDHVRFCFEVLVNHLKKKHYPQPHFPNDTYPLFVTWHIESYGHSKLRGCIGNFSPLKLHEGLLKYALISALKDTRFKPITLEELPRLSCAVSLLTDFEQADDYLDWEIGVHGIWIEFIQQDGEKETATYLPEVIKEQGWTKEEAIRSLLRKGGYYGNITKEYCESSIILTRYQSQKKEFSYKSLFH

SEQ ID NO: 367753 - protein, 100 aa, Zea mays
  Clone ID: MRT4577_98563C.1.pep
GGCRCLCTCWRFIATVRHRGAPVLPVSAYIIRFGAGLSLPALSPWPPYSAICVLIVLRELLCVVATGGLGETGDERLASCYSHQRARYRKLHPMEELPLA

SEQ ID NO: 367754 - protein, 229 aa, Zea mays
  Clone ID: MRT4577_98564C.1.pep
RVGGRVGGDSRCLALEKVAESLELPCKYCSLGCPEIFPYYSKIKHEAQCSFRPYTCPYAGSECAVAGDIPFLVAHLRDDHKVDMHSGCTFNHRYVKSNPREVENATWMLTVFHCFGQYFCLHFEAFQLGMAPVYMAFLRFMGDENDARNYTYSLEVGGNGRKMVWEGTPRSIRDSHRKVRDSHDGLIIQRNMALFFSGGDRKELKLRVTGRIWKEQTNPDGACIPNLCS

SEQ ID NO: 367755 - protein, 74 aa, Zea mays
  Clone ID: MRT4577_98565C.1.pep
HASYPHKSWELLGSECLGVVFIKHVAPTLLSVYLNVGYRSSRSVISGSGMLGNSYVCSKLGSWCVPCCPYRVQR

SEQ ID NO: 367756 - protein, 150 aa, Zea mays
  Clone ID: MRT4577_98566C.1.pep
ARVDMHSGCTFNHRYVKSNPREVENATWMLTVFHCFGQYFCLHFEAFQLGMAPVYMAFLRFMGDENEARNYTYSLEVGGNGRKMVWEGTPRSIRDSHRKVRDSHDGLIIQRNMALFFSGGDRKELKLRVTGRIWKEQTNPDGACIPNLCS

SEQ ID NO: 367757 - protein, 445 aa, Zea mays
  unsure (1)..(445): unsure at all Xaa locations
  Clone ID: MRT4577_98567C.1.pep
SSPARPPHASGSYSREETVSSVSRRSRSCQSRRNKRRDESGRASASPRGHRTASSSSPANPTQRTPNESSPTSAAARTSESQRRCAQGTAGRGAAMDMDSVECLSLPDAAMDVDNVEGRPHHGHLGLPLHPAHLPSSGAGRAFPKVNAGGAVAGPAGAAGTAGAGVGPPATSVHELLECPVCTNSMFPPIHQCQNGHTLCSTCKARVHNRCPTCRQELGDIRCLALEKVAESLELPCKYCSLGCPEIFPYYSKIKHEAQCSFRPYNCPYAGSECAVAGDIPFLVAHLRDDHKVDMHSGCTFNHRYVKSNPREVENATWMLTVXKLALNYSLSAAPSIFICVVYELITGPKHHIFKSGGIIYFLLLILXPCLQVKYVYCQVIXWLNVAFRFXFHCFGQYFCLHFEAFQLGMAPVYMAFLRFMGDENEARNYTYSLEVGGNGRKMYG

SEQ ID NO: 367758 - protein, 79 aa, Zea mays
  Clone ID: MRT4577_98568C.1.pep
CPTGGRDKWPPQKALVFNPPVPPKGNPGPKAGPGFIAPPGFRGSCLTYRPIPLISNFWIFQPSSPLKPGGRFLGPFFRV

SEQ ID NO: 367759 - protein, 192 aa, Zea mays
  Clone ID: MRT4577_98569C.1.pep
LSVSDRMKSSGCKPDTLFYNALINLLGRAGHLFEANQVFRVEMPRNGVLRNVATYNTMISILCQYGRDDDALGVLKEMEAQSCKPDLKTYQPLLRLLLGRRGQAAAVHRLLSEIRDRNGLGLDLDTYTLLIHGLCKVGETDWAYLLYDEMVGSEIVPRPRTCELLLSEMQRQNMEACVERIRNDVSFFGLTQ

SEQ ID NO: 367760 - protein, 97 aa, Zea mays
  unsure (1)..(97): unsure at all Xaa locations
  Clone ID: MRT4577_9856C.1.pep
PPPKPGVFCPPPLAPPHLGFPPNLPPTKGPFFTPKSFFPPPQXNFKKPPPFPLTAPPPRNGTFPPPPFNTRPPPGKKIPGNFMLVPLIKPTRKFFSL

SEQ ID NO: 367761 - protein, 126 aa, Zea mays
  unsure (1)..(126): unsure at all Xaa locations
  Clone ID: MRT4577_98570C.1.pep
PPVSSACXNPILQPYRIQQAITGGILPISPLFLQQSSALLQQLPLGRXLAQNIRAQQLQQLVLANHAAYCQXQQLLSFNQLGALDSACYLLQHRLRFRXIAGGYPQXLLAWNQLAGWNCSGYVPRP

SEQ ID NO: 367762 - protein, 170 aa, Zea mays
  Clone ID: MRT4577_98571C.1.pep
GRVGGRVRGRVGRDARPGSSKFDDKVRYIFFGVSSQQVWHIRGHVRLGCSRPGTATKPRGSLPMEINPAHRKTSVRLSPMWAVSRSFLVVPARETRPVDRGWKISQPGLHANAKGTRLLVGVDLLRRPLVIDYPYIGLTWRRRASTILGPYTLSFRELHLKKPMNIRYYK

SEQ ID NO: 367763 - protein, 97 aa, Zea mays
  Clone ID: MRT4577_98572C.1.pep
ACLSWGASGWASSSACSGASSVWRTVTSGPGLAALSALARAGGARSARIPLSVLHLQSVVVKQVLRCPSRSAPGRHLAPPTPVRPCRNASAHDYAML

SEQ ID NO: 367764 - protein, 92 aa, Zea mays
  unsure (1)..(92): unsure at all Xaa locations
  Clone ID: MRT4577_98573C.1.pep
FVGALKVSKTENCEKCFDSRGGPPKCKAMSHMTTYISGRENTSSETGDCRSMEKILCSHQVMQTVYMTMHASIAVHPKPYXPHKDEAQNSNR

SEQ ID NO: 367765 - protein, 95 aa, Zea mays
  Clone ID: MRT4577_98574C.1.pep
KQKKSAQSYLLAPQRPKHTHILAPQIILYPCNARQNFMGHAASNLLAVSVQCTQLNSLIQASSQLAVKIALHILRIQRLGYHASSWLDYIKTKYS

SEQ ID NO: 367766 - protein, 286 aa, Zea mays
  Clone ID: MRT4577_98575C.1.pep
MPPAVGLLPLLLLFHLPVSLCSHHHHHSTPPASPSPSPSPAPSSAPLAVLLACNATRFHPACVSTLSGAAPDASSNVNLSNAATNCLTFLALSSRRLSPSPSAPPLLSASTALLHLYDCWSAYKYVNFSRTISDAMAYLDDTITVNGMGKTVITGDLNADTSGVSTFNTATVGVLADGFMARDLTIANTAGPDAHQAVAFRSTGDRTVLDGVELLGHQDTLYAHAMRQFYTRCRVAGTVDFVFGNSAAVLHDTVLVVLPRQLRPEKGENDAVTAHGRTDPAQPTGI

SEQ ID NO: 367767 - protein, 422 aa, Zea mays
  Clone ID: MRT4577_98576C.1.pep
MPPAVGLLPLLLLLLLFHLPVSLCSHHHHHSTPPASPSPSPSPAPSSAPLAVLLACNATRFQPACVSTLSGAAPDASTADLLAATLSALRARLPPAVSTAKSVLASSSNVNLSNAATNCLTFLALSSRRLSPSPSAPPLLSASTALLHLYDCWSAYKYVNFSRTISDAMAYLDDTITVNSNYISMLAARQRYGDETSLWRPPQTERDGYWPPPAASSGADRRARGSGLPATADGLNLLGHQDTLYAHALRQFYTRCRVAGTVDFVFGNSAAVLHDTVLVVLPRQLRPEKGENDAVTAQGRTDPAQPTGIVLSRCSVNGSEEYMALYRERPGVHHVYLGRPWKEYSRTVYVGCTLAEIVQPQGWMPWNGDFALQTLYYGEYDSAGPGSAAGRRVAWSSQVPKVHVDAYSVASFIQGHEWIPRV

SEQ ID NO: 367768 - protein, 83 aa, Zea mays
  unsure (1)..(83): unsure at all Xaa locations
  Clone ID: MRT4577_98577C.1.pep
YLGXLVQPTWSSIRHPSVPDLDSCQCVQDFCFAEVKFYSSVDLLRTTRTFAWCPLFACYSLRSNPMLMERSYSTLPSSLLPYS

SEQ ID NO: 367769 - protein, 509 aa, Zea mays
  Clone ID: MRT4577_98578C.1.pep
MAGRARARRLVLAGALMIAWLLLCLLPRATAAAVRRSDFPPSFLFGTATSSYQIEGAYLEGNKSLSNWDVFSHTPGRIEDGSTGDVADDHYHRYEDDIELMHSLGTNAYRFSISWARILPRGRFGEVNPAGIAFYNRLIDSLLLKGIEPFVTLSHYDIPQELEDRYGAWLGGAEARRDFGHLADVCFAAFGDRVRHWATFNEPNVAVTRGYMLGTYPPGRCSRSCARGNSDAEPYVAAHNVVLAHAAAVQIYKTKYQKGLIGIVMSTVWFVPLTDAPADRLATERALAFDVPWFLDPIIYGDYPPEMRRLLGSRLPTFSPEDRRTLGYGLDFIGINHYTTLYARDCMFSPGYCPSGQEFHQSLAAYTGERDGIPIGPPTAMPTFYVVPDGIEKMVTYIMNRYSNLPMFITENGYAQGGDGYTTRAEDWLDDQGRIQYLEGYLAKLAKVISDGADVRGYFIWSLIDNFEWLYGYTLRFGLHYVDYQTQERKPKSSALWYKRFLQSSLEAQ

SEQ ID NO: 367770 - protein, 61 aa, Zea mays
  unsure (1)..(61): unsure at all Xaa locations
  Clone ID: MRT4577_98579C.1.pep
LGGLSSVTCLANTAREAWECTSDYVEKVRRMMAKAQXHAAHKIAQGWHGIHSMVHDDGADT

SEQ ID NO: 367771 - protein, 103 aa, Zea mays
  Clone ID: MRT4577_9857C.1.pep
RGAPWGPGGRSGFPFWCPRAPFSILGGFTLFLFFFFPCSFLGGGFCSLQFWLGPGAEGGTLVPFPVVFLRNWWGWCPFLPSGSVVPFFGKFFYLPPLNILNPP

SEQ ID NO: 367772 - protein, 91 aa, Zea mays
  Clone ID: MRT4577_98580C.1.pep
GASASHFFLVKKIFLFVYLYHPVLFLEPTTLKNYMVLSILFFIPYHLYYSPFCLMFLKKFICNPCFFSPYLWLGNFQFFTPFVPPLSFLHC

SEQ ID NO: 367773 - protein, 107 aa, Zea mays
  Clone ID: MRT4577_98581C.1.pep
CMAWPIDLGNFGCKVKAPFGAAMEKKNAPPVYLRFVKKGFILKVYNKGACFPAPPPHGLFFCGGGVYPSFGLVVLQFAPPKKKKKKKKKKKKKKKKKKKKKKKHPPH

SEQ ID NO: 367774 - protein, 67 aa, Zea mays
  Clone ID: MRT4577_98582C.1.pep
FLQHYITLSEAEKNRKLNDLLDALDFNQVVIFVKSVSRAAELNKLLCECNFPSICIHSYDLVYLVKC

SEQ ID NO: 367775 - protein, 71 aa, Zea mays
  Clone ID: MRT4577_98583C.1.pep
GSSVSFSDGCMCCYLNCSCPSSLAASEQIRQKLRQVARMRAPGSICPWSPSLVLVHGIISLTKVSGVAHLM

SEQ ID NO: 367776 - protein, 171 aa, Zea mays
  Clone ID: MRT4577_98584C.1.pep
VASSKKWESNVHIESVQEPYEGHTTKKVKSDAKKKKLIDAKNSKNRNDISAVMKKEIDIETVAGQKIVSEALNISLLSDPRAMDAKGENRLEVEPAENNLAGTRDARLKERSTKTNCMPIIVEPAKAEATECLENSSFGSSEMDFSAVKAESKSKAEKGEASLEERNTTNG

SEQ ID NO: 367777 - protein, 28 aa, Zea mays
  Clone ID: MRT4577_98585C.1.pep
LWTHLILRFSHILRTLWFIVDMKASLLI

SEQ ID NO: 367778 - protein, 49 aa, Zea mays
  Clone ID: MRT4577_98586C.1.pep
ETSLRSCALIKKWGCNQIPNLIYPNTGFQSGDHKKILAYLLQQYPARTP

SEQ ID NO: 367779 - protein, 150 aa, Zea mays
  unsure (1)..(150): unsure at all Xaa locations
  Clone ID: MRT4577_98587C.1.pep
MAPIAGTAKTGDAKTQALMVDNVDASTAAAXRSTNYIHTYETFDRPTTLKKXKDPKYPRXKLPGMNKLDQHQILKFPITTQSVIKKIEDNNTLYFIVDLNANNMKIKAGVKNMYDIQANNVNTLIRPDGKKRXYVKLTPDYDALDVXNKI

SEQ ID NO: 367780 - protein, 97 aa, Zea mays
  Clone ID: MRT4577_98588C.1.pep
KWVVPPPPPCFPFQSYSPIGFPGSGVWIPNRPDRGGPTNFGFLSKKDLWVRLGFVTLSFFLKGLDFWGKKKKKKKKKKKKKKKKKKKKKLVEGGPVY

SEQ ID NO: 367781 - protein, 46 aa, Zea mays
  Clone ID: MRT4577_98589C.1.pep
RPMPSNQQLKPEYHMTTKHHACCSAPYLDRRCTFSPICKSEPTDSA

SEQ ID NO: 367782 - protein, 154 aa, Zea mays
  unsure (1)..(154): unsure at all Xaa locations
  Clone ID: MRT4577_9858C.1.pep
MATKIFSXLLMLPCSFLXGGNATILPECSQASKRDVLSPYVASRIAXKDEKTHLXPYRLQQARGGRHIPFSPLVLQQSPNICLVQPLLHTIWGQQLRLLALPVINQASLGCLSNYCQRQLFFLFNQLSTLNPETYPQQQLLPCIQLDTAYSEKQ

SEQ ID NO: 367783 - protein, 143 aa, Zea mays
  unsure (1)..(143): unsure at all Xaa locations
  Clone ID: MRT4577_98590C.1.pep
MTVPLLTNKIVNKRVKXKIKRPHLDCYFALGRTSARPKRDSISRVRINLTGCDLXRPYIGYXLDQSTRXYLPNNCDNLACHNVSELXLFMMHNRIYXYENDHYVYTKKRKEIVQHAADLHIACTNKLDKLRILERRYSLMFLS

SEQ ID NO: 367784 - protein, 32 aa, Zea mays
  Clone ID: MRT4577_98591C.1.pep
FPPVTPMVRSSPIDIEHTLKGKGNTFAFLAHH

SEQ ID NO: 367785 - protein, 80 aa, Zea mays
  Clone ID: MRT4577_98592C.1.pep
TPHGRDKKILGGKAKKTQAFVKKKKGEICKALKGLGFIYLRKKSWTQKRFGFKPNNEGGVCWGFAQKKKSNRQIGALGNF

SEQ ID NO: 367786 - protein, 97 aa, Zea mays
  unsure (1)..(97): unsure at all Xaa locations
  Clone ID: MRT4577_98593C.1.pep
FVDVLGLEEESLGSVPAPACALLQLFPLTAQHENFRKKQIEELKGQEVSPKVYFMKQTIGNSCGTIGLIHAXANNQDKLGFEDGSVLKQFLSETEKM

SEQ ID NO: 367787 - protein, 142 aa, Zea mays
  unsure (1)..(142): unsure at all Xaa locations
  Clone ID: MRT4577_98594C.1.pep
HALCHLNDGLPVGYWQHHQIEFNPLDLSIVVAYKQQQQVRHRLPXMKLLAMVNALTXLQHKQLVXCNQLAIGSAPTYLKXLMLNQXMLQQIVPALTQLAVANRAFYLQQLLXIKQLTVSNSAIYLQQGQQLLNALNGGNPLG

SEQ ID NO: 367788 - protein, 57 aa, Zea mays
  Clone ID: MRT4577_98595C.1.pep
RWVPHTWGLEETKSMSSQIPRHFGSKGQNTGKGSPFFFKERFCWIGFTLQNNGGGLV

SEQ ID NO: 367789 - protein, 177 aa, Zea mays
  Clone ID: MRT4577_98596C.1.pep
MSAPNSDSNMQQLVPIAPPGKASGGDSGKELVVADPAGKRSGGVKLREDEEDLEVKLRRIMENVPVRVSNTSGSSAGSGSGDFHQYRQMRRREQDRLARMDADYQKRKEIAEFELRREERMKAAEERTAKKRLKRQKKKQRKKEKRAKTGDNGGEEPNRVESSDDDEGSDDDDKSKQ

SEQ ID NO: 367790 - protein, 63 aa, Zea mays
  Clone ID: MRT4577_98597C.1.pep
MSFLTGKLTPPPPPLIPECWVCPSRLKKKKKKKKKKKKKKKKKKKKKKKKKKKKKKKKKKNPP

SEQ ID NO: 367791 - protein, 76 aa, Zea mays
  unsure (1)..(76): unsure at all Xaa locations
  Clone ID: MRT4577_98598C.1.pep
LLQIGELDAVNVLIVALALLALAASAVFSTSGGCGCQTPPFHLPPSFYMPSSFYLPPHHHPXPIYFPTQPPYLIPF

SEQ ID NO: 367792 - protein, 51 aa, Zea mays
  unsure (1)..(51): unsure at all Xaa locations
  Clone ID: MRT4577_98599C.1.pep
IKLRAIHVGVRTGGXITTILFXSXRTDPXGVXXDGGGAAVLPFQXGLGELF

SEQ ID NO: 367793 - protein, 158 aa, Zea mays
  unsure (1)..(158): unsure at all Xaa locations
  Clone ID: MRT4577_9859C.1.pep
AFTWCGPTAPGFPPXLAPGGGPPGGGPGAGPPRVFQPGLPVASVPAPPGQRCGGAPFGAPSVPPVRGPVRVPPPRVGPGPPPLQPLQKRPPGVGAPQPRARAGVPAPGPPPRGGPLGPVFPPPLGXPPPFEGPFPPPKVRIMPPPSFLGRPFFCFVAE

SEQ ID NO: 367794 - protein, 54 aa, Zea mays
  Clone ID: MRT4577_985C.1.pep
EGIHLISYFKSSQCLMNNGLAMHDSMVLMKTMRLYSLKELSLCQHLIICPLQTI

SEQ ID NO: 367795 - protein, 42 aa, Zea mays
  Clone ID: MRT4577_98600C.1.pep
VGNLFRKFIEDGDEVILRGCCKGEGYNIGFGRCTGKVLPALL

SEQ ID NO: 367796 - protein, 99 aa, Zea mays
  Clone ID: MRT4577_98601C.1.pep
KPPMWPVFKGSTGHDRSLGGWAPRGLTQAGHLPEPRVRAGVHGGAPQPEFLGRSFLGAPDGPPGVLFPPAGVGSGPRPSVHLTTREFFPLWFLTAGYYS

SEQ ID NO: 367797 - protein, 139 aa, Zea mays
  unsure (1)..(139): unsure at all Xaa locations
  Clone ID: MRT4577_98602C.1.pep
MSAVAVSSSLNPDAPLFIPAALLQVEDFSPQWWDLITTTAWFRDHWSRERAHLDEMAEQIDAAGLLPXEDLFYDDQPEQGPAAAALXDRFGAQGXNMTSPKGGGDAPRGFREKPRNAEKPTKYAGSPKSSAPRVIHQPR

SEQ ID NO: 367798 - protein, 84 aa, Zea mays
  Clone ID: MRT4577_98603C.1.pep
FSFFFFFFFFFFFFFLLNCYSTTNFFLNADGYTLPFLGVLPYTTPRLPPGGSPFPFFPTLAWPKPCGGSPLFFSPPGKNRARKI

SEQ ID NO: 367799 - protein, 87 aa, Zea mays
  Clone ID: MRT4577_98604C.1.pep
WQQTRVPCQQLQDCLPSVTRPVPCQECVPSVSLPVPRPRLAHRHRGCRRDQQLWRVTCLVRLVRCPRVTKMMGARIDSCVRVIGRVG

SEQ ID NO: 367800 - protein, 140 aa, Zea mays
  Clone ID: MRT4577_98605C.1.pep
MSAVAVSSSLNPDAPLFIPAALLQVEDFSPQWWDLITTTAWFRDHWSRERAHLDEMAEQIDAAGLLPDDEDLFYDDQLEQGPVAAALKTDSVLKALNMTSPKGGGDAPRGFREKPRNAEKPTKYAGSPKSNAPRVIHQPR

SEQ ID NO: 367801 - protein, 65 aa, Zea mays
  Clone ID: MRT4577_98606C.1.pep
LHNAAHLKPEDIMKEMMEQRQAPQQQQQQTQAVVSGYNRIDGADSDNMDDDEEDYDDDDDDEDND

SEQ ID NO: 367802 - protein, 557 aa, Zea mays
  unsure (1)..(557): unsure at all Xaa locations
  Clone ID: MRT4577_98607C.1.pep
YATRHFVLHGLDKVLEGGAVVMTLKDRGTWEPGANAWDADMLENIEIGEQKQRDEAYKASKKKGTYDDKFNNDSSSKKPILSHYDDQMEDKRPRLNPGPPFCGEDDLCMYXSDHTNIVAWLRRFCNSVXTCASLXSALNTPVMVLKIKXDTVSVSIKCSDXCDLDALEAEAIASGLGAADRGSRNDGKRQSAREEEQAADAEKRSSGYQTAIAKAEEASRALRGEKTAPAKPAEELVFGDDYEDLQKSLEQARKLALRKQEEASASGPRSIVELATATKSQEETEATEGDSEQNKVVITEMEEFVWGLQLNQGTRKPEDDVFMDEDDDAMPSDNVAKDDTNGLAEMEEDALTEIPAKVEEDEVKPDEVIHEVAVGKGLAGALKILKERGSLNEGTDWGGRTTDKKKSKLIGVEDGPKDIRIERIDEFGRVMTPKEAFRHLSHKFHGKGPGKMKQEKRQKKYHDELKTKHMKSSDTPLLAAEKMREAQSRNQTPYLILSGNAKTGQTSDSGGYATLETEQPGSLTPMLGDKKVEHFLGIKRSAKPGSLPPPVPKKPKN

SEQ ID NO: 367803 - protein, 118 aa, Zea mays
  Clone ID: MRT4577_98608C.1.pep
LPGKKGFFWRRSLKGNRYTLPPKLPARWFTNLPQTRRNWSETPGRPLCKNFIYQGFGTLGGPNGLFVAPGAKDFPKTITFYFAPTLGVSRFTLTLARFFLKDGLNPSVVTFSFLFPQA

SEQ ID NO: 367804 - protein, 58 aa, Zea mays
  Clone ID: MRT4577_98609C.1.pep
TSRSQLRFMVARQFVILLTFSLITGMSDRVVSVMLSLTYWDMSSLPSMHPPSIRSHEL

SEQ ID NO: 367805 - protein, 51 aa, Zea mays
  Clone ID: MRT4577_9860C.1.pep
PAGSGHNLLGFLYRLLSWWWKDLSVKYDIRLDHDLMDQMVCLHTYTEGLLA

SEQ ID NO: 367806 - protein, 124 aa, Zea mays
  Clone ID: MRT4577_98610C.1.pep
MGGKCPHRKVKKRRLNCKQVRRGKFLVKADDAVYDELVKLADQGKDSEGKALPVDEDLPGMGQFYCLHCDRYFADETVKEDHYRSKRHKKRVKQLSGPAPHTQIDADLAGGMGMPDNGLKLMSS

SEQ ID NO: 367807 - protein, 91 aa, Zea mays
  Clone ID: MRT4577_98611C.1.pep
GACYQYQQWGCILKHYFVVQQQHQVFCIHHQNFQQELVYQYQQWECNLKHYFVVLSQYLLLDNRQYYQQLWQACQYHLWAYIYLFRDLRVT

SEQ ID NO: 367808 - protein, 66 aa, Zea mays
  unsure (1)..(66): unsure at all Xaa locations
  Clone ID: MRT4577_98612C.1.pep
VTSTVDSLDSHDLEGVXLTFDAIIDDGDHSSLMSGALSPSIIQNLSHSSSRLTTPRTPLPFPALSM

SEQ ID NO: 367809 - protein, 105 aa, Zea mays
  Clone ID: MRT4577_98613C.1.pep
KKEPGEKKDGEKKDGDGKKDGEGDKKKDGEGEKKEGGEGDKKKDGDEKDKDGDGKKAAAPPTEQQIMAELMNQYRAYYYPYPHMTYPTHYYVQSMEENPNSCTIC

SEQ ID NO: 367810 - protein, 112 aa, Zea mays
  unsure (1)..(112): unsure at all Xaa locations
  Clone ID: MRT4577_98614C.1.pep
MRVVLVALALLALAASATSTHTSGSCGCQPPAPGHLPPAVHLPPPEDLPPPVHLPPPVHLPPPVHLPPAIHEPATVDLTATACHYPTQPTRPXAHAQPHPCPSEQPHSRPYQ

SEQ ID NO: 367811 - protein, 66 aa, Zea mays
  Clone ID: MRT4577_98615C.1.pep
WHLHGAFAKTGNWWRGSLRFGVMKLGRAGGKQLVLLNNSGGLGYHTLGAKAVFFPMKKLWGGKFPF

SEQ ID NO: 367812 - protein, 62 aa, Zea mays
  Clone ID: MRT4577_98616C.1.pep
TRYRASQSSRPYSSISFCERSTDSHRTMPFMRPIRSGIPTATSMRPAMATAEPSTSSLVHAA

SEQ ID NO: 367813 - protein, 50 aa, Zea mays
  Clone ID: MRT4577_98617C.1.pep
HNRINGYEKKKKKKKKKKKKKKKKKKKKKGAGGLYKPTKLTHACKRINIF

SEQ ID NO: 367814 - protein, 108 aa, Zea mays
  unsure (1)..(108): unsure at all Xaa locations
  Clone ID: MRT4577_98618C.1.pep
FSWLQLPSNACYTISCTPSLRWCSFLLCVFLPGAYCPAEPTQCLRDPALTLAYPHLLPHLPCTPHTHPDQHVRSXPHSTSPYHNTSYSPAFHFLSNILNLPPYLHMFF

SEQ ID NO: 367815 - protein, 31 aa, Zea mays
  Clone ID: MRT4577_98619C.1.pep
MEPTGSRPHELLTARPASHTYIHTLRSHRIP

SEQ ID NO: 367816 - protein, 47 aa, Zea mays
  Clone ID: MRT4577_9861C.1.pep
YNNNYIPIPFTSNMINITIQNSYLSKVLTYSTLTYVNYTTLITKNES

SEQ ID NO: 367817 - protein, 231 aa, Zea mays
  unsure (1)..(231): unsure at all Xaa locations
  Clone ID: MRT4577_98620C.1.pep
IKTPLNASDDLNAHMQDIVLNHGTDCSPGTVTSQGKEGSSXGTXGNGICTGVTCGSPSVISCAESFPQGGGNGSNDLLDHTLCGQSEDPKDRGASADATQRSKQCCTRNMKSAPGSEETSAAGGDRSFSFEVGAPPNVAEKAHSSVWSPFHLKSTETVTENLQAGSSLKDTSDDSKKTSTIGACKEQLSERKVADSSXGSPPDNSNIGGSIKSRSSPPQQHPIPEVSDLVN

SEQ ID NO: 367818 - protein, 88 aa, Zea mays
  Clone ID: MRT4577_98622C.1.pep
HASGHASAHAYAAIGGGTPRDKASQLGVTLSPLPTVTFGHPHCLHWGLPRCRPRLCCAARHARAVAVRACSSFPSPDSSSCARMEEAV

SEQ ID NO: 367819 - protein, 129 aa, Zea mays
  Clone ID: MRT4577_98623C.1.pep
VHLSLDIEEFKHKGSHKSFVRCLPSSQRNVTEISHMQPVARGLQVDKTFSDKGSCHASRTVSGMPIRPKYYLSSPNNNLKSPPTVKSCSQMSDFSYRLVRSAKRSASPRMGLTSTNYSLYEKMSLLRQR

SEQ ID NO: 367820 - protein, 128 aa, Zea mays
  Clone ID: MRT4577_98624C.1.pep
GNFLATHNLIETMRERMFKPALSTIITENTEVATVSLSDPVCVAARKMRELQVNSVIITAGNLLDGIFTPRDVLMRVVAQNLSPELTLVEKVMTAHPDCATLDTTILDALHMMHDGKFWHIPVLDGDG

SEQ ID NO: 367821 - protein, 75 aa, Zea mays
  Clone ID: MRT4577_98625C.1.pep
PGGQPYFPKGRVKKAGGKKEQTSHLEKKVTRQNLKKKNRRDPKRVLPGVTREAPTAHFLGGKPGPLTRKKTRPSP

SEQ ID NO: 367822 - protein, 55 aa, Zea mays
  Clone ID: MRT4577_98626C.1.pep
ITHGVRLLRFMGFWGIKRPSWCCFCTTKRVVWHTHSQICPNSVRLLYSSLGQGRN

SEQ ID NO: 367823 - protein, 123 aa, Zea mays
  unsure (1)..(123): unsure at all Xaa locations
  Clone ID: MRT4577_98627C.1.pep
MNDASVFKQIQXMVRHIRYVVSXKASQISLHVLEEXNITSCLIDIAVKKINMQEYEPKEKRGAVLKKIEYTMQMKAXAMKELYAHDELACKMKDDPVKELLLVSHNHHEYMNLVXDLIIQGIA

SEQ ID NO: 367824 - protein, 181 aa, Zea mays
  Clone ID: MRT4577_98628C.1.pep
HESGTRTVDQNVWGEIRNFKKCLLKMFAQQDKDVLFMETVISLARQRRHCMIECIPVPCEVSSNAPMYFKKAIDEAEEEWTQHEMKKVIPTSASRNLRQVIPENFAYFHVEFGLDRGFVHVIDDESKFSAGFGLNVIRGMLQLPEEDMHRRRRHESMDNQRQAVASFMKDWEPFDWTKQLD

SEQ ID NO: 367825 - protein, 496 aa, Zea mays
  Clone ID: MRT4577_98629C.1.pep
MEPAAGRRARCLLLPLLVGALALALAGAATATAWPHPHGGAAGLGHGAGAAAAGAGRPGGAERWYRDLALRRMESVRSSFGARRDLATASASARVYHVTDYGADPTGAADATAAISKAIADAFRPPTNATMTGGIPDLGGAEVHLDGGTYLIKGPLTLPASGGGNFKIHSGSLRASDDFPTDRYLIELSAAKSGRSYDYEYATLRDLMLDCSYRGGGVAVVDSLRVAVDNCYVAHFASDGVAVRGGHETLIRNTYLGQHMTAGGDPGERGFTGTAIRLDGNDNSVSDVVIFSAATGIMVTAPANSISGVHCYNKATGFGGTGIHLKIPGLTQAWISNCYMDYTSIVAEDPVLLHVSGSFFLGDANVVLKAVSGVARGVQVVGNIFSGRDKGVDIVQLDGAFATVGQVYVQQNSATGMTVRSTSARASLQGNGTSWTLDFSPVLLFPDRIGHVQYSLVAGDEFPGHTLRNVSGNQVVVATDKAVSATVHVLVDQNSD

SEQ ID NO: 367826 - protein, 156 aa, Zea mays
  unsure (1)..(156): unsure at all Xaa locations
  Clone ID: MRT4577_9862C.1.pep
MNHPAMAAKLTRLXSLSARLXSTFSSHPNELIALFSRYVHQXTGMLYRHDLLAEFAALFDIDEENSAPFEDILRAAHXSLPLPPWVCPGIMPRPGVXRYTYXNVSDLTAXELSVSEYMTLKEXLLAGQSTISLXLELESEPFNASFPRTCMIDTPS

SEQ ID NO: 367827 - protein, 755 aa, Zea mays
  unsure (1)..(755): unsure at all Xaa locations
  Clone ID: MRT4577_98630C.1.pep
MDEAFARAVEDGLKLTKRLVLXRGRDAAAAAPAPGDGPXDPAAALQQLMPAAPMAYAVVVDPAAVDSPDVPSYQPHVYGRLDPPALIPLQMREVELRVDCAAGCATAEVALRARWWLHCITRSRACHCRIVVPMAHQGSILGAEVTVGKRSYNTHVIDTEDNCSVKIAMPESGGLLKQEFFSLTIPQVGGGEDIFATIRWSQKLLYDNGQFSVEVPFRFPQFVNPLPKVFMKKEKIQLIVNSGVTKEILLQGTSHPLKEKSRQGEKLSFLHEAVVENWSTKDFTFAYTVYSGDLSGGVLVQPSTLRDYDDRDMFCLFLLPGNNENRKVFRKAVVYIIDTSGSMQGKPLESVKNALSTTLSDLIPGDYFNIITFNDELHSFSSRLEQVNEKTIGNAIEWMNLNFVAQGGTNIMHPLSEAMTLLSTSHDALPQIYFVTDGSVDDERNICHTLKTQLIKSGSKSPRISTFGLGSYCNHYFLRMLASIGKGHYAAAFDTGSIEGRMLQWFQKASSTIVSNVSIDAIKHIQDFEVDSVYIPDISAKYPLCVSGRYNGKLPETLIAKGHLADMSEISIELKVQHIKDIPLDKVLAKQQMDLLTAKAWLMENKELERKVVKLSIQNSLPSEYTRMVLLQTSLDKIDPAQQAKNKPTKQSSSPDELPAMPLGGLAVGFGDVAATTENLTTGFGDMKAAEKFVMLEKAAGCCSRMADCCCCMCFIKACSKMNDQCAIVMAQACAALACLGCFECCSELCCGGPN

SEQ ID NO: 367828 - protein, 59 aa, Zea mays
  Clone ID: MRT4577_98631C.1.pep
CWLALGSPGSSAGLMVLRMLEGPPPPSKGMVFSVLSRAGFCSPPQREVSGWRRRRRYGE

SEQ ID NO: 367829 - protein, 201 aa, Zea mays
  unsure (1)..(201): unsure at all Xaa locations
  Clone ID: MRT4577_98632C.1.pep
MLRKRSYNTHVIDTEDNCSVKIAMPESGGLLKQDFFSLTIPQVGGGEDIFATIRWSQKLLYDNGQFSVEVPFRFPHFVNPLPKVFMKKEKIQLIVNSGVSKEILLQGTSHPLKXKVFIFLLHKSQHMITTQSSVVVXEKSRQGEKLSFLHEAVVENWSTKDFTFAYTVYSGDLSGGVLVQPSXLRDYDDRDMXXXXLLPGK

SEQ ID NO: 367830 - protein, 67 aa, Zea mays
  unsure (1)..(67): unsure at all Xaa locations
  Clone ID: MRT4577_98633C.1.pep
EETFSSFRNAFRGKSTFAIQLTKRDTCYFSFLFLLTACRVAIRAQVMVGXWXPXXGVGXXPGKIXGP

SEQ ID NO: 367831 - protein, 219 aa, Zea mays
  unsure (1)..(219): unsure at all Xaa locations
  Clone ID: MRT4577_98634C.1.pep
TRPIMKNDAPARIIPIPALNPYQGRWAIKARVTAKGEIRRYHNAKGDGKVFSFDLLDNDGGEIRATCFNALVDRFYEVVEVGKVYVVSRGNLKPAKKDYNHLNNEWEIFLEPQSTIELCLDENSSIPAQRFSFSSIDKIENSENNAIVDVIGVVTSVNPSTTIQRKNGMEAQKRTITLNDMSXRSVELTMWGDFCNRESSQLQEMXECGAFPVLACKAG

SEQ ID NO: 367832 - protein, 93 aa, Zea mays
  Clone ID: MRT4577_98635C.1.pep
AQVVRTVHEPVGHGSGVVTPEVVPRTAVGQRLGPKLAAVPGSPGPGSRLKGPSGSQVNQAGAGVPDAATTRKTAPRVVNAMCSCDGRAGSRLE

SEQ ID NO: 367833 - protein, 88 aa, Zea mays
  Clone ID: MRT4577_98636C.1.pep
TVPFTDQRQLCASIHAQTTVRHHLEYPYNVENLGDMVLHQTLNIKPMEFLGYTREQTRPKDVARAPLDTDAHQTSCPRLLKGVQGHQP

SEQ ID NO: 367834 - protein, 62 aa, Zea mays
  Clone ID: MRT4577_98637C.1.pep
CASQVEQSAQIFLFLLFLDVFIHNSQGLTSDRTPYNTSPHGTHHHDTWIHPVGTHATPFLFT

SEQ ID NO: 367835 - protein, 142 aa, Zea mays; identical to SEQ ID NO: 210430
  Clone ID: MRT4577_98638C.1.pep

SEQ ID NO: 367836 - protein, 142 aa, Zea mays; identical to SEQ ID NO: 210430
  Clone ID: MRT4577_98639C.1.pep

SEQ ID NO: 367837 - protein, 72 aa, Zea mays
  Clone ID: MRT4577_9863C.1.pep
AFVYAVFSKGASNIDHGLCQRLHTGKRNQQPVSSYDTRTKIWPTHTELQSGQDRLKVIYRHPPVPQHLHSPA

SEQ ID NO: 367838 - protein, 99 aa, Zea mays
  Clone ID: MRT4577_98640C.1.pep
ESELPLDSSYFYEQIMLRKNSYQRCMNEETSATYESPNKLHLLVHPRQNHCQNCFSLSWSVRIMSLPLSPSRLKIWWFSPITLYVYPVQTFGKLKAFSI

SEQ ID NO: 367839 - protein, 139 aa, Zea mays
  Clone ID: MRT4577_98641C.1.pep
NFVFSILLFFFYVFFFIIFDLFTSLFFIFLLFLKELNTVPNNFHHKGEYIIHNSGVKVQLKRTSSSNFSNCNSPVPILPPKPKARFPTYEDWHNPHRGFAINRASANRTRGPCHRRQSHPSKPHSKPQRAKKKPRGRGG

SEQ ID NO: 367840 - protein, 67 aa, Zea mays
  unsure (1)..(67): unsure at all Xaa locations
  Clone ID: MRT4577_98642C.1.pep
NFWFXNQIILFFDXKPNKXXGGATLTEDQANLNHSKQQRCNKGRSFFPRKKQQAWNTKTSIHPSLNN

SEQ ID NO: 367841 - protein, 108 aa, Zea mays
  Clone ID: MRT4577_98643C.1.pep
EPAGLFFPSSFVLPPPPGQFSSVQLSCGGDRSPFPSRGSGPVISPVLIVWTPCFSVVSPCTFCKVSFLPPFGVLVGNLWYSKVHAPDNQGKHLYPPLKGCVLGLCPIF

SEQ ID NO: 367842 - protein, 43 aa, Zea mays
  Clone ID: MRT4577_98644C.1.pep
ASTTKRFLSITIVADRARLLQAGLVFYFGCNKSIQKPYILQIS

SEQ ID NO: 367843 - protein, 215 aa, Zea mays
  unsure (1)..(215): unsure at all Xaa locations
  Clone ID: MRT4577_98645C.1.pep
MPLRDGCRRRLQRARGLCLAAALCVLALALASDASPAPVSLLGINYGRVGNNLPPPRAALPLLQGLGIARVRLYDPEPGVLRAFAKTGIELYVGAXDQCLAEVAEPAGATSWLKDSILPYLPDTKIVALTVGNEVLTGNDTALTRNLLPAMESLHGALAAANLDKQIAVTTAHNLGVLGTSYPPSAGAFRKDLLQNLCPILDFXAKTGSTFLVNA

SEQ ID NO: 367844 - protein, 75 aa, Zea mays
  Clone ID: MRT4577_98646C.1.pep
CSWAFLRSVTEPFSTCSQLYTSFFPYFTGGFSWKPILTSDHRHEQDLPYTLSSHRSLYRVPWDLCTNISQHYTTG

SEQ ID NO: 367845 - protein, 98 aa, Zea mays
  Clone ID: MRT4577_98647C.1.pep
MVLAMLGALHPRAGLSLFLHLILAVALLRSQPLRSQRSVPEAFSAPLELSQPLSGLVDDYGILPKHPRPRGPRPLLSRAQQRKRDGPDLAEYYYDAHL

SEQ ID NO: 367846 - protein, 115 aa, Zea mays
  Clone ID: MRT4577_98648C.1.pep
RPRRRTIQFVDWSPTGFKCGINYQPPTVVPGGDLAKVMRAVCMISNSTAIAEVFSRIDHKFDMMYAKRAFVHWYVGEGMEEGEFSEAREDLAALEKDYEEVGIETAEGEGEEEME

SEQ ID NO: 367847 - protein, 50 aa, Zea mays
  Clone ID: MRT4577_98649C.1.pep
YWLHSTLLMPTTTHWELALPNHKIHHLRVQKKYSRTCQMKKMPLFLNGKT

SEQ ID NO: 367848 - protein, 64 aa, Zea mays
  Clone ID: MRT4577_9864C.1.pep
GVKRANARKNFPPCYACFKGNLFGAPKRTCGKNRSPPFGNTSVSFSWKTNPWEEPLPGAPLTGG

SEQ ID NO: 367849 - protein, 53 aa, Zea mays
  Clone ID: MRT4577_98650C.1.pep
STINKSLVSISLTATSRPLLPHHDNSPTLHLSISSSATLTFPQCISSICSFQI

SEQ ID NO: 367850 - protein, 95 aa, Zea mays
  unsure (1)..(95): unsure at all Xaa locations
  Clone ID: MRT4577_98651C.1.pep
ARLGRAGLGSPLYRXGPPDGLIPLPEHGTVEVRSCRAGPNSTAHLVARAGPSLTLGMKGSGSELLRSPRTQAIVQRINLISQGGGVQFSFRLITS

SEQ ID NO: 367851 - protein, 76 aa, Zea mays
  Clone ID: MRT4577_98652C.1.pep
GIWFSNLNSSLHIIVVSYAPISSHTVAYFALTLIYWVKVECLLHSHWTFEGLAIFLRNLEFYHALWSQTSCYSHLF

SEQ ID NO: 367852 - protein, 66 aa, Zea mays
  unsure (1)..(66): unsure at all Xaa locations
  Clone ID: MRT4577_98653C.1.pep
HPNMTDKPTXRXAANKDLLVNMRSIDHEALLRPMIGHVSHMREADNYPYRDEPGSGKAAAQVRWVE

SEQ ID NO: 367853 - protein, 60 aa, Zea mays
  Clone ID: MRT4577_98654C.1.pep
PVRVKVSLSEQVLHLNLEASSGHSTVQPGVNLNRVASGSASARHDTQKACYNHHGRRGQH

SEQ ID NO: 367854 - protein, 106 aa, Zea mays
  Clone ID: MRT4577_98655C.1.pep
RPGPLQVLALLDSPHLLKPPWASPLCCVRAWACEPPPMLHDHCCGRSLGRDDSRGPHGTRVIPISRCLSSPPRSRRVASLDLYVVQSSQRGYESLEDQVGTCGSQV

SEQ ID NO: 367855 - protein, 104 aa, Zea mays
  unsure (1)..(104): unsure at all Xaa locations
  Clone ID: MRT4577_98656C.1.pep
MRVLLVDLDLLALAASATSTHTSGGCSXQPPTSVHVPSTVHLPPTGHLPPPEHLPPPFHLPTSVHLTPSVHVPSPVHLTTPPXHYPTQPSRPQSHPXTHPCPCQ

SEQ ID NO: 367856 - protein, 212 aa, Zea mays
  Clone ID: MRT4577_98657C.1.pep
PRVLPRVRKEARGLAVGPRLVQRLSGFGDHRSADNVERVAEEELAHASVGLYWFLKECQVMGREPSNTFQDLIKEYDVVLEGPFNYTAMASPDLLFNLRNLFYLGAYRAAINNIDVPGLDADAERDAIVFRSYIALGSYQDKQLKSHPPKNVESKILREHIKKEREAAKAGKRPYYLKKSELRERKLMNKYNELKEAGKLEALSAYKSTSVS

SEQ ID NO: 367857 - protein, 54 aa, Zea mays
  Clone ID: MRT4577_98658C.1.pep
RPRRTRLLFFFSDVGKKKKNGGKIIILKWKGTWFEIQIQDQPTFGCILPNPPVA

SEQ ID NO: 367858 - protein, 109 aa, Zea mays
  Clone ID: MRT4577_98659C.1.pep
SSFSKLKVLGLEKLKKELQSPGLKCGGTLQEGGGRLFLFKTTPLDKLPKKLPSKANGGKLKVPKNKKGPMGPRLKFFLAKKGKLVWGKHVLKALGLVLQLNKSLDGRKC

SEQ ID NO: 367859 - protein, 38 aa, Zea mays
  Clone ID: MRT4577_9865C.1.pep
CPKFCTEFRNCIVCLSLILESVLVNYKKVVEAFLILLV

SEQ ID NO: 367860 - protein, 113 aa, Zea mays
  unsure (1)..(113): unsure at all Xaa locations
  Clone ID: MRT4577_98660C.1.pep
LHSYSFVIPKSNSMALALQLQHWESQNLAHLNLIGLDPHFAICSCSNKDQADTRLPLXHMLNVKGDWHCPCTLTSTAVVVTLTLTVTVAIAIALAPVPFVPSFLVMFTGFAFQ

SEQ ID NO: 367861 - protein, 49 aa, Zea mays
  Clone ID: MRT4577_98661C.1.pep
RFRPTRSRWCRSEALDDMCFGATEAWRLPRQVFSCDPPSGAGAGAAHAR

SEQ ID NO: 367862 - protein, 588 aa, Zea mays
  Clone ID: MRT4577_98662C.1.pep
MADDSFDLPSASEEDVMGGLDEDEAMKDLETGMDDEDYLPPTMKVGEEKEIGNEGLKKKLVKEGEGWDRPEFGDEVEVHYTGTLLDGTKFDSSRDRGTPFRFKLGQGQVIKGWDLAIKTMKKGENAIFTIPPGLAYGEMGSPPTIPPNATLQFHVELLSWASVKDICKDGGIFKKIIVEGEKWENPKDLDEVFVKYEVRLEDGTVVSKSDGVEFAVRDGYFCPALSKAVKTMKKGEKVLLNVKPQYGFREEGKPASGDEAAVRPNAVLHIDLELVSWKTVMLIGDHKRILKKVLKEGEGYEGPNDGAVVKVRFIGKLEDGTVFVKKGHDGEEPFEFKTDEEQVIEGLDITVVNMKKGEVALARVPPEQAFGSVETNQDLATVPPNSTVLYEVELVSFEKEKESWDLKTNIEKIEAAAKKKDEGNVWFKMGKYAKASKRYEKAAKYIEYDSSFNEDEKKQSKALKVSSKLNNAACKLKMKEYREAEKLCTKVLELESTNVKALYRRAQAYIELVDLELAELDVKKALEIDPDNRDVKLVYKTLKERMREYNRRDAMFYGNMFAKWRKLEQLQKVPGKQEPQPMAIDSAA

SEQ ID NO: 367863 - protein, 105 aa, Zea mays
  unsure (1)..(105): unsure at all Xaa locations
  Clone ID: MRT4577_98663C.1.pep
RARSSATTTNDNGRRVFAGLEFLKRCSCCHREXLTPHMDVFVYKGEQGFCSAECRCRHITKEERREMEILLRKRRDAFHRRHAAAAAPKMQASDRRITLQITAAR

SEQ ID NO: 367864 - protein, 67 aa, Zea mays
  Clone ID: MRT4577_98664C.1.pep
NDSSLRLLFSLFVALSFNFCFLVDGLFRGGRGWDLNLFSIGGDPSIYQQQQQEQPCFLSNNTLELNS

SEQ ID NO: 367865 - protein, 76 aa, Zea mays
  unsure (1)..(76): unsure at all Xaa locations
  Clone ID: MRT4577_98665C.1.pep
CHRDLDAXMDVFVYKGKQGFCSAECRCPHITKEERREMKILLRKRRDAFHRRHAAAAAPKMQASDGRITLQITPER

SEQ ID NO: 367866 - protein, 65 aa, Zea mays
  Clone ID: MRT4577_98666C.1.pep
RGRGRGTPSMSPPNRSHACVAHDMVRHTSPLPRTPHCPTHEPIAAASLILFSLAAMVALGNDTIY

SEQ ID NO: 367867 - protein, 49 aa, Zea mays
  Clone ID: MRT4577_98667C.1.pep
TRPTDSTLADLDGEHVHHGHRTATQLANDADAKWIDLQLSTAHIYFNHP

SEQ ID NO: 367868 - protein, 89 aa, Zea mays
  Clone ID: MRT4577_98668C.1.pep
TRTGQPAAVPRHPSRAPPESPDASYRRGVTPAFSRCCIAGRTPSSRTSSAPRAWPVPSPGATSPRDGCSSSIQCSTWPGRVYTSICSPA

SEQ ID NO: 367869 - protein, 83 aa, Zea mays
  Clone ID: MRT4577_98669C.1.pep
AGDCSSKLAIDPYEIDSIRLDSTAISYPLLSSPRLTMSWPPNQHRCNFLRWVPYPLGNYPSLYTYNLKNLMHSPCVHAQGKTN

SEQ ID NO: 367870 - protein, 248 aa, Zea mays
  Clone ID: MRT4577_9866C.1.pep
MLSRLLPRHHHRRLLQTLSRAAVAAPDVDLHQRLCSSSAASSPSLSIWRRKKEMGKEGLMAVAQLKRLAALPPAGGHPRLEQFMCSHVSRLLRTDLLAVLAELLRQDHVSLSMKIYGVVRKEIWYRPDMYFYRDMLYMLARNKKINETRQVWADLKSEDVLFDQHTYGDIVRAFCDADLIDLAMEIYDDMRSSPDPPLSLPFRVILKGLVPYPELREKIKQDFLELFPDMIVYDPPDTLSDIDEEFKF

SEQ ID NO: 367871 - protein, 65 aa, Zea mays
  Clone ID: MRT4577_98670C.1.pep
RCRRPPGLALTSKVDVGIVSLLDAGDHLSGARVPGLEHLCRRGSTMISSVDEELSAPALHSGHLQ

SEQ ID NO: 367872 - protein, 100 aa, Zea mays
  unsure (1)..(100): unsure at all Xaa locations
  Clone ID: MRT4577_98671C.1.pep
DWRFEKDIKRKQXLNYSIDFGVCIXCGNCVEYCPTNCXISMTEEYELSTYDXHELNYNQIALSRLPISIMGDXTIXTIRNSPQSXIXEEKSWNSRTITDY

SEQ ID NO: 367873 - protein, 332 aa, Zea mays
  Clone ID: MRT4577_98672C.1.pep
MSSRMAGAALLRHLGPRLFAAGPAVSGLTARGGMPAAARLLPARMASTAAEAAREDAGANKRHGGTEKHEEEAAGGQSKKAVVSYWGIDTPKLVKEDGTEWKWTSFRPWDAYTSDTSIDIGKHHAPTTLPDKAAYLIVKSLRVPMDLFFQRRHASHALLLETVAAVPGMVGGMLLHLRSLRRFEHSGGWIRALLEEAENERMHLMTFLEVTQPRWWERALVLTAQGVFFNAYFVGYLLSPKFAHRVVGYLEEEAVHSYTEYLKDLEAGIIDNTPAPAIAIDYWRLPADAKLKDVVTVVRADEAHHRDVNHFASDIHYQGMKLKDTPAPLSYH

SEQ ID NO: 367874 - protein, 94 aa, Zea mays
  Clone ID: MRT4577_98673C.1.pep
TDMCHRASHAIFGWQRTRDGRTPIPDAAEMKVPREVGNRWGTELRGTTLLSVQQRSAPPPPTGAPSTQLTNPSSFSNWDSTQVRGPGSSPLHRT

SEQ ID NO: 367875 - protein, 105 aa, Zea mays
  Clone ID: MRT4577_98674C.1.pep
SDPDYDRNYTRYVRNPVPDFNLSPGAFNFVVPQFMQYGVGYMQSPGMSTNQLTVYFGQPDLAMGSSSGATVYPHWPTPAMMYPHCYDNVGPMISQVPLYQSFNHG

SEQ ID NO: 367876 - protein, 89 aa, Zea mays
  Clone ID: MRT4577_98675C.1.pep
FFLRLHLCGGRTFFITFRLVQLWVDYPSVEEEHFSSPLGLFGYGWINENLSGFHLNSHQFIPNQTRGIPRKKKGNRAPLPSAISKCRSM

SEQ ID NO: 367877 - protein, 94 aa, Zea mays
  unsure (1)..(94): unsure at all Xaa locations
  Clone ID: MRT4577_98676C.1.pep
FINTWRKVDWLSEKXHARDFTVSAMHGDMDQKERDVIMREFRSGSSRVLITTDLLARGIYVQQVSLVINYDLPTNRENYIHRIGRCGRLGRKGV

SEQ ID NO: 367878 - protein, 129 aa, Zea mays
  Clone ID: MRT4577_98677C.1.pep
GLVRTRGNPHIYMISASTIHRASLDTKKTATAGGDKAGNKPARGNPRNTPLKGLSVPLAPNDPGPLKEPGGGPNPGPRPPPAGGGGPAVGGPNSDNNGGLDPTGGVNPVGGERLVGGLVPTGTLEWELP

SEQ ID NO: 367879 - protein, 171 aa, Zea mays
  Clone ID: MRT4577_98678C.1.pep
SILIPPPFPEIFQAPPPLGSYKSPLPVLQFTKSRSCSSQLSSSHGAGRVPPQLLLLARPAEVPWRSSLPAFSPAALWRPPPLGRALPPCPDCRPPSARAHGRGGPNPHCARRISPLSAHLCRCPARGALSLARSSAPAPLRRAVPSRAPIQPCRALPTPSCNSVPLPARWS

SEQ ID NO: 367880 - protein, 67 aa, Zea mays
  Clone ID: MRT4577_98679C.1.pep
AGGFFFFFFFFFFFFFFFFFFFFFFFFFFWGTRNNTRDFLGGGGARNNLWPWGGAKKLCSQIGTKGH

SEQ ID NO: 367881 - protein, 104 aa, Zea mays
  Clone ID: MRT4577_9867C.1.pep
NGIWQSKLRPLPPLKINLGPIPGPWAQLMKHNQTMAQGPERTGGQRFSPNPPIWKAAPGRLTTDAPSIKMRGNPDQKGQRWAWKIRRTPKEGGWSFVYLISSKT

SEQ ID NO: 367882 - protein, 128 aa, Zea mays
  unsure (1)..(128): unsure at all Xaa locations
  Clone ID: MRT4577_98680C.1.pep
KNKGRKGLLFVGKRGNQFDPSPEKLXTVSLNLAGVKRAFIVKPXLGKIKRENLQETCKSYWGEXKKSGLLFYKNLIQLGLRXWGVKGKSKCRVPRAXTKYRMDALKLQTITPWLAGTNNNGKAGGWPQ

SEQ ID NO: 367883 - protein, 142 aa, Zea mays
  unsure (1)..(142): unsure at all Xaa locations
  Clone ID: MRT4577_98681C.1.pep
SNRPQQKQQQELAQPSSKXQQQQNRPHNQLGAIHSASKXQQQQQPDSQQPAAYPQQDLPTDQQAAMNSPAXRQQQQXQPISQXAGVSPATFRTQPQRKPFXQHDAPNAGTLXQLHHXLPFNQLALTNPAVFYQQPIIGGVLF

SEQ ID NO: 367884 - protein, 100 aa, Zea mays
  Clone ID: MRT4577_98682C.1.pep
ALYLSRGRHPLDDRCWPPSPHAPMYCTGPIAELECHLVFTLPSALQSRSILAQAGPHDLTPKTAGLDRVRCIARARISAVCAIKDRGFSLLIESFTLWAT

SEQ ID NO: 367885 - protein, 98 aa, Zea mays
  unsure (1)..(98): unsure at all Xaa locations
  Clone ID: MRT4577_98683C.1.pep
LPFFFFNLGKGPNLSQKYCFPPKNFGILGKKFLSLLLFQGPIFKLLKLHPPSFFPQLKRTFHFAKGVXFFLHLCNYNRVYHPKRGFSFWGCVAQQNIF

SEQ ID NO: 367886 - protein, 198 aa, Zea mays
  Clone ID: MRT4577_98684C.1.pep
EMERLVAATAKLCSEMEALDELESAERKMSVQGWSRLSGPIPQQPQAAAQQQQLLAKDSPGAESLRQELKTQQLKVKRLKEESLWNESYKKAVGLMARAACAVFVRICSIFGPFVPGLPPPLPSATTDSVQTRLSKLLHPRLGKTKASSGPITRRDGPSHRVHPPMSSNSCPIIGRHLPGHNPHTNWRKLLDAPPSTV

SEQ ID NO: 367887 - protein, 59 aa, Zea mays
  Clone ID: MRT4577_98686C.1.pep
ATGFFFFFFFISLSIYIPSLVLSVTEKKCRCYVEYNSTIIVCIIINPAILCVNPIELGR

SEQ ID NO: 367888 - protein, 66 aa, Zea mays
  Clone ID: MRT4577_98687C.1.pep
QTSTVSRTTPPGTTSATAGTISDIDADAAATKTLMGTYDVRTTIRQGRFPKVKHAPDSHIRLIRTI

SEQ ID NO: 367889 - protein, 85 aa, Zea mays
  Clone ID: MRT4577_98688C.1.pep
HASELITASCKTYQCTEQMANYTGRALHVIHDSYRRIQLMYSDIPIPVAQAQRHYQPIKSHRMVTCDHPPIEGTAVLYTRHTDAV

SEQ ID NO: 367890 - protein, 86 aa, Zea mays
  unsure (1)..(86): unsure at all Xaa locations
  Clone ID: MRT4577_98689C.1.pep
XFFFYSFIFFFLFFFKVIFQPVHMERSLIEAGGHTKPPRGPSLACQHTLKKVWATPAGAKKPAFAHPTPKNKPPHKFARKKWGAPP

SEQ ID NO: 367891 - protein, 44 aa, Zea mays
  Clone ID: MRT4577_9868C.1.pep
PHLPLSDIYRKLLLSQARQDRFVMLARRHWATCHLQPLLLLASS

SEQ ID NO: 367892 - protein, 72 aa, Zea mays
  Clone ID: MRT4577_98690C.1.pep
MDAVYSALIEPDDSVNRRGLTYAKDKLDDHITVYEWLYTHGTNDQTALHGLKGDPTYLLVEHDKTLCHYRIN

SEQ ID NO: 367893 - protein, 252 aa, Zea mays
  unsure (1)..(252): unsure at all Xaa locations
  Clone ID: MRT4577_98691C.1.pep
AIQSDWSPFXMFEINRKIDSILNRKRRSAPLNLNASASHVLALSSQEYMMHSHQIADENMDMCRPAEGFASHLEDPAGLNSDPSGPKLKGQLLDTVSCSCSKDDTNSADCLIDEQHTSHYFANSKHELPSVSNEKKFKFAGNNHNRIVASASHKHESVAEAMFCAPVLGSELQNEPITISNIGKKDGENFHEMYNCNSKAVPCSLLAHEHHRHLKTQRTESAGNLKVCTLPDQTANELADKSNGDLLTYGPK

SEQ ID NO: 367894 - protein, 72 aa, Zea mays
  unsure (1)..(72): unsure at all Xaa locations
  Clone ID: MRT4577_98692C.1.pep
WSGSFPSELCMGNAXGPNTNGSELFICTAETPWLDGKHXVFGQKRXGMEVAKGIEKVGSRSGATSKEVKVAD

SEQ ID NO: 367895 - protein, 44 aa, Zea mays
  Clone ID: MRT4577_98693C.1.pep
LWFACCISSSYMVCSSTFVRSILYEIIKSFFSCKKKYQGWPLAI

SEQ ID NO: 367896 - protein, 76 aa, Zea mays
  Clone ID: MRT4577_98694C.1.pep
GSSWRLMPTTCAQRIHGHLRPTLTFPRLLHARSLPAFASCWTSVFAFANRRLLCCAAPLVVAKGGFSGVSPDSSQG

SEQ ID NO: 367897 - protein, 69 aa, Zea mays
  Clone ID: MRT4577_98695C.1.pep
IRFFYFTMISFHTFLFCWPKLRTSFTCEQSPNHSLKGPSLKGNFFYKKKHLFLNLLWNNDLNSRCGKNP

SEQ ID NO: 367898 - protein, 167 aa, Zea mays
  Clone ID: MRT4577_98696C.1.pep
SSYFSSPPPLIIDADFLGSRPLTNGASPCTRYAPLSLVLFSSALHWPTLAAASIALVASYSMFCTVAGSMVDHGSVRKTGPRPLPPASASPRVGALTSARSLPVVHRTGQTKPGMLAVPLNFCPDLTSFISIPFVMNVCMRCILCNDFGTEFEVSSTNLGSRAILSL

SEQ ID NO: 367899 - protein, 75 aa, Zea mays
  unsure (1)..(75): unsure at all Xaa locations
  Clone ID: MRT4577_98697C.1.pep
GEGQGFFFIFFFLFFRFLISQTLIYRPMHIIIGWYAQHDNEAGGLLFFFHIMDGGGGGGXIFFYFRESXVGGGGS

SEQ ID NO: 367900 - protein, 184 aa, Zea mays
  Clone ID: MRT4577_98698C.1.pep
MAVPTSTSSPLPLLFLHRCTANSSPSVLSFPSSLRGASLRSRAAAAPPAETLSDDGIPDAPPEGAGTGIPLPSSIGDDGEQLAPKQKIRIKLRSYWVPLIEDSCKKIIEAAKTTNAKTMGPVPLPTKRRVYCVLNSPHVHKDSRFHFEIRTHQRLIDIMYPTAQTIDSLMQLQLPAGVDVEVKL

SEQ ID NO: 367901 - protein, 190 aa, Zea mays
  Clone ID: MRT4577_98699C.1.pep
CSFLSPWAVHTTTSSSHPLLFLYRGTANPSPAVLSLPSSLRGVSLRSRATAAPPAETLSDDGIPDAPPEGEGTGIPLPSSIGDDGEQLAPKQKIRIKLRSYWVPLIEDSCKKIIEAAKTTNAKTMGPVPLPTKRRVYCVLNSPHVHKDSRFHFEIRTHQRLIDIMYPTAQTIDSLMQLQLPAGVDVEVKL

SEQ ID NO: 367902 - protein, 163 aa, Zea mays
  unsure (1)..(163): unsure at all Xaa locations
  Clone ID: MRT4577_9869C.1.pep
MLSRLLPRHHHRRLLQPLSRAAAAAPDVDLHQRLCSSSAASSPSLSIWRRKKEMGKEGLMVVAQLKRLAALPPAGGHPRLEQFMRSHVSRLLRTDLLAVLAELLRQDHVSLSMKIYXVVRKEIWYRPDMYFYRDMLYMLARNKKIXETRQVWADLKSEDVLFD

SEQ ID NO: 367903 - protein, 289 aa, Zea mays
  Clone ID: MRT4577_986C.1.pep
MAALYALVAVSLLPVLVTAECDCSDDDATGRDKAGALRLKIIAIFFILAGGAAGAAVPALGRRLPALRPGAGPFLAVRAFAGGVILATGLVHILPAAFDALGSPCLAAAGGPWARFPFAGTVAMLAAVATLVVDTVATGYLRRKAAAVGDEPPQLGGDDPEEASGGGRHGHAHGVDDDDDDLVRHRVVSQVLELGVVVHSLIIGMSLGASDFPSTVRPLVPALTFHQLFEGIGLGGCIVQAKFRLRSMVAMAVFFSLTTPIGVAIGIGISSAYDETSQTALVVQGLFEA

SEQ ID NO: 367904 - protein, 77 aa, Zea mays
  Clone ID: MRT4577_98700C.1.pep
PDWCTDRSVFRPQFSLSGSKVPAVFIKCWLIGRAPDANRASLCRSAMVCLIPLGDICCSVSSIEGHLSTSRWFRHAA

SEQ ID NO: 367905 - protein, 101 aa, Zea mays
  Clone ID: MRT4577_98701C.1.pep
LLFQLRRAVCVFFLGTGSRGSPILYGFHKVPPSFVIFFSLPASFVLLFVAPFFFFWDFLPFFLFPPVSPCSRLCSYVSPSRLGVNFGAPGSPSGISQKTPR

SEQ ID NO: 367906 - protein, 49 aa, Zea mays
  Clone ID: MRT4577_98702C.1.pep
SRICLYVWSKGVVSMYRILRQMLHVSGPLSGQAMSLSTTSDIKALFTVP

SEQ ID NO: 367907 - protein, 72 aa, Zea mays
  Clone ID: MRT4577_98703C.1.pep
CVCVNRQVITIVMRLCLGAQVEPVVCVAYVVDKPKYSDSYIVRQVISNALMLWSKVRWFHRTRVRREEEHRV

SEQ ID NO: 367908 - protein, 57 aa, Zea mays
  Clone ID: MRT4577_98704C.1.pep
SPYACEAQHSARAAKKVLMLYGDYMEDSEGMVPFRVIATPSALARRPVLSAAPPSMC

SEQ ID NO: 367909 - protein, 66 aa, Zea mays
  Clone ID: MRT4577_98705C.1.pep
IVLRHKMILSCLFWGKKANGHPSPSKSGCPTKPDELPHSRHFLEPPYLYSPLSGEGTSKPPKARFH

SEQ ID NO: 367910 - protein, 49 aa, Zea mays
  Clone ID: MRT4577_98706C.1.pep
LDISGDEIHHLHIGSVCDVRCQIQLLTDNLDMDRIHCLAQCESDVSHRR

SEQ ID NO: 367911 - protein, 57 aa, Zea mays
  unsure (1)..(57): unsure at all Xaa locations
  Clone ID: MRT4577_98707C.1.pep
GRAIRATCKFSRAVVAQXXSTNAKSIGQQYCCNDGPPLSTWKKDEITACVLCSFQSV

SEQ ID NO: 367912 - protein, 240 aa, Zea mays
  Clone ID: MRT4577_98708C.1.pep
MAPQTRRERLAGEARPSSSGLTPAKPGAVEVQRRRVGSGWTSRRISIYASRVYFLLIMLQIPLFRVPCRAGTCTTPIQVTSSQLVSNDIFPAAVVKAMLYPGATVSSLTKSKTFPSWNDLFDMYNLTEAKNASAVVDLQRLEILAGSYFCVAGALIGIINPGRMTLFGTLLIIWGMVKEALFGKPVNSDLTQSTYVYPTILIALICAFMSITYNVKKTARSSTPVSIAKPLISSAKSKLK

SEQ ID NO: 367913 - protein, 93 aa, Zea mays
  unsure (1)..(93): unsure at all Xaa locations
  Clone ID: MRT4577_98709C.1.pep
RCLAPXPGFRFFLLRLFCLPVCGPLGAPGSVAGLSXXAGRSXLFXVCVLVAGVAPPXPLXXGFSRWXLCGLPLSFGFLGXAPAPXWFPSPFAP

SEQ ID NO: 367914 - protein, 151 aa, Zea mays
  Clone ID: MRT4577_9870C.1.pep
KIGVAMPLMPHSSVFACPCICCENFHLLRHSIGDTCSIRWLKCHSRLIYETFLSSRRHQSKLLSTTVLARSTRKVSSHLAIVIILHGKSVESSIEVYMQSEFEQLNSLHCYNVVEEFSVVKTKWPATVLVFYIETTSFSHCDDRIIEFSVP

SEQ ID NO: 367915 - protein, 45 aa, Zea mays
  Clone ID: MRT4577_98710C.1.pep
TGPTHTYLIPFLINSTAFFLPSYPHHQRALFNQSPTSLIYSLMTP

SEQ ID NO: 367916 - protein, 46 aa, Zea mays
  Clone ID: MRT4577_98711C.1.pep
REFKRCGITSLVLFCTTCFFSSLGFQVSLWKTKFLFLNIIMDFGPH

SEQ ID NO: 367917 - protein, 220 aa, Zea mays
  Clone ID: MRT4577_98712C.1.pep
RPGREKWGESGTVDLKHELEQVILLITCRCLLGREVRQNLSDDVAALFHDLCNGMQPVSVIFPYLPIPAHRRRDRARRRLREMFATIIRARKASGRSEEDMLQCLIDYRYKDGRATTEDEIAGLLITVLFGGQQTSSITSTWTGAYLLQFRRYLAAAVEEQEEAIRRCGDRINHDVLAEMDVLHRCIKGALRLQPPLPIVFRWSHSDFAVTTREGGACRP

SEQ ID NO: 367918 - protein, 72 aa, Zea mays
  Clone ID: MRT4577_98713C.1.pep
ALILWAAVGCLPETTQFSCGIKLVVGCQSVFGSFDRDLVAHPVRLFACFVVLASWPGYVYGDGLWFCSPSPL

SEQ ID NO: 367919 - protein, 88 aa, Zea mays
  Clone ID: MRT4577_98714C.1.pep
MWGLLGFIFNHVVYRRYKAWWMRHNYVLAAGLDAGVAFMGVLTFVALGYFDVYGPQWWGSVADDRCDLAACPTAPGVVAKGCPVVAAE

SEQ ID NO: 367920 - protein, 76 aa, Zea mays
  unsure (1)..(76): unsure at all Xaa locations
  Clone ID: MRT4577_98715C.1.pep
NGEVTVVTLLNSKLFHMNMYRGKDMLIKDVTVTAPGDRPNTDGXYLCDSFGITITNTVIGSGDECIFIGPGTYKVN

SEQ ID NO: 367921 - protein, 188 aa, Zea mays
  Clone ID: MRT4577_98716C.1.pep
IDVLGTSSYIILASPVQERRHLIACLSYGGGADRSVGECIRRDRRCPVHGGELRFGTRQGFREHTHTAAAVKAGSLSETERKVVSPPLSPFSLLRGSGSGSAESPTKKLRGKDHSLCLIIIYIVQYQSVCLRSGFQFSTLCPRTQHAGEKTTRRRGERGRRKNSFLVVTGSGDEGDGRSTRAEGGGKT

SEQ ID NO: 367922 - protein, 65 aa, Zea mays
  Clone ID: MRT4577_98717C.1.pep
CCVLVRCSYERTPRLRILLPYKRAAHTPPETDRCRPLLDSELQATRGADSRGYSLVRGLTKRCIE

SEQ ID NO: 367923 - protein, 107 aa, Zea mays
  Clone ID: MRT4577_98718C.1.pep
MRTRRVQAASMGISESRQKQVSLISLINKGRVVAKGKLVTTNSQREILGAKLGPEYCGVLVEGLENIELGNIIDEEVPRPSNQIRTLIDAIGCVIPWPITHVKQARS

SEQ ID NO: 367924 - protein, 86 aa, Zea mays
  Clone ID: MRT4577_98719C.1.pep
GIFSRTLSRGTWVNLDGVAGHGPLLPGILSLRHFLIPNGVSQPMRVHQHAPCTSSRRISCSSRSSSSSCRGAGPAPLRSRSTGLFL

SEQ ID NO: 367925 - protein, 317 aa, Zea mays
  unsure (1)..(317): unsure at all Xaa locations
  Clone ID: MRT4577_9871C.1.pep
MEVALWDPQIDGITARGRRPRSALALYMEGADPALDLDLKFESSLEAMVLLQRSVXRQWELPFKDDISSMEDKVDERLSKAMVVVAWSTYRHXQHRMSGXRRGVRRKSVTISPKLSQSQNCIYLHGTIGKDLFTHKXVVQLSMKIRGQSRRWSPRGRHLSSLARWPMEPPTPAIRAGHEEEEHRAWATQATCGLGARRRGTYSAPTRSSRHPRRVPQVVVCGSNPIFPGSGVLSPGRGQVRRVLRCPPAHDTWSPTDADLAEQLLEGFVERTSGREPTGVGLADVLRVHRDANIASTCACLPRSASAGLDQHVGWGR

SEQ ID NO: 367926 - protein, 107 aa, Zea mays
  Clone ID: MRT4577_98720C.1.pep
RQKQVYLISLINKGRVVAKGKLVTTDSQREILGAKLGPEYCGVLVEGLENIELGNIIDEEVPRPSNQIRTLIDAIGYVIPWPITHVKQARSSSCTRNKLVPAARGQS

SEQ ID NO: 367927 - protein, 253 aa, Zea mays
  unsure (1)..(253): unsure at all Xaa locations
  Clone ID: MRT4577_98721C.1.pep
MNNFHVYEAIGRGKHSTVYKGRKKKTIEYFAVKSVDKSQRSKVLNEVRMLHSLDHANVLKFYSWYETSAHFWLVLEYCVGGDLKGLLEQDKKLPENSIHDLAYNLVKALQFLHSQGIIYCDLKPSNILLDEFGCMKLCDFGLARRLKDIEKTNPGDVPQPMRGTPCYMAPELFRDGGVHSYASDFWALGCVLYECYTGRPPFVGREFTQLVKSVISDPTPPLPDNPSRSLQNLIDCLLMKDPAERXQWSELCE

SEQ ID NO: 367928 - protein, 96 aa, Zea mays
  Clone ID: MRT4577_98722C.1.pep
WRTTGRGSRCTALWGPGGAARPLHERGFPRHVAARENRRHFLSSRPPFFFPALAPVRCKVFNGGLFKVRAETKYFGPFMEIRTTAFICRFLLQLVC

SEQ ID NO: 367929 - protein, 51 aa, Zea mays
  Clone ID: MRT4577_98723C.1.pep
MNAFQIWDIRTHKLKMDLPGHADEVYTVDWSPDGEKVASGGKDRVLKLWMN

SEQ ID NO: 367930 - protein, 39 aa, Zea mays
  Clone ID: MRT4577_98724C.1.pep
SIHKEDVYENLHTKNKREAKVKKQRSADKEKSKGSLKRK

SEQ ID NO: 367931 - protein, 1461 aa, Zea mays
  unsure (1)..(1461): unsure at all Xaa locations
  Clone ID: MRT4577_98725C.1.pep
MVSALSRSPCPFCTGYLSWMAEPSLAEIMAQLKSLTAEMTTLKSDMAAIKDTSSSSGGNIAARRTEGLRDQDFHHKHRKWDFPHFDGTTDPMLFLHKCDAYFHHHRTMAEERVALASYHLDDVAQMWFTQLQDDDGTPTWGRFKDLLNLRFGPPLRSAPMFELSECRRTSTVEEYSNRFQALLPRAGRLEEAQRVQLYTGGLLPPLSHAVRIHNPETLAAAMSLARQVELMELDRIQQAPPRATSRALLPTSAPRATVPAAPASLALPAPXTPASXQAPPPRGAPNPVRRLSTEEQAERRRLGLCYNCNEPYSRGHNRVCRRIFFIDGVELDEGAMDEEAPVFSLHAVAGVPGSKTIQLPVRVGAADFIALIDTGSTHSFIGEEAAHRAGVHIEQRPRLTATVANGERVSCPGVLRHAPVLIDGLQFKVDLFLMPLAGYDVVLGTNWMAPLGDIMWNLAAGTMAFQYAGRSVCWQGLAPKTPGRLHSVEAREPFLDALLGEFQDVFADPSGLPPERGRTHRIVLKPDATPVAVRPYRYPAAHKDELERQCHAMIAQGIVRRSDSAFSSPVLLVKKQDGSWRFCVDYRELNAITVKDAYPIPVVDELLDELHGARFFTKLDLRSGYHQVRMRTEDIHKTAFRTHDGLYEFLVMPFGLCNAPATFQALMNDVLRPCLRRFVLVFFDDILIYSKSWADHLRHLRAVLSELRRHVLFVKRSKCAFGEPSVAYLGHTISADGVAMDATKVQAIHDWPVPRSARAVRGFLGLAGYYRKFIHNYGTLAAPLTSLLKKEGFSWGTEAAKAFEDLKTAVTAAPVLAMPDFAKSFVVECDASSHGFGAVLIQDGHPVAFFSRPVAQRHRALAAYERELIGLVQAVRHWRPYLWGRRFCVKTDHYSLKYLLDQRLATIPQHHWVGKLLGFDFSVEYKPGAANSVADALSRRDTEDGALLALSAPRFDFIDRLRHAQLADPTLVALHADISAGSRQAPWALVDGMVHFAGRLYIPPTSPLLQEIMGAVHEDGHEGVQRTLHRLRRDFHFPNMKQRVQDMVRVCTVCQQYKSEHLQPAGLLLPLPVPQGVWTDIAMDFVEALPRVRGKSVILTVVDRFSKYCHFIPLAHPYSAESVAQAFFTDIVRLHGVPQSIVSDRDTVFTSAFWRELMRLLGTKLHMTTAFHPQSDGQSESANRVIVMYLRCLTGDRPRQWVRWLPWAEYLFNTAFQSSLRDTPFRVVYGRDPPSIRSYEPGDTRVQAVAKSMEERAEFLADVRYRLEQAQATQKLQYDRDHRSVSYQVGDWALLRLRQRSASSLPQDMGGKLKPRFVGPYRVVELINDVAVRLALPEGARIHDVFHVGLLKKFQGAPPEVILPLPPLRHGAIEPEPEHAVRYRLARGVPQVLIKWKNCSAASSTWEDTDTFRTRFPSFQLEDELTLDGEGDVMVGRTYVRRHRARDVRRALEQAAARQDS

SEQ ID NO: 367932 - protein, 97 aa, Zea mays
  Clone ID: MRT4577_98726C.1.pep
TKVPEPNINIDFNMFVNGPQWVGTIPVEICLSGKGCKNSSGLLALCTRRLKAITALSLACDKQTSPPPPRTHASWSVAFWGFWYSGLHVVHVAARPR

SEQ ID NO: 367933 - protein, 67 aa, Zea mays
  Clone ID: MRT4577_98727C.1.pep
TPYGRACDSAFSTRMLLLGQVPQRTHHPLDRVHGVGARSRSRMCQGNLMRASGFAFGKFTRPAPDPQ

SEQ ID NO: 367934 - protein, 100 aa, Zea mays
  Clone ID: MRT4577_98728C.1.pep
LFVVAVHFGAPCRVYRAFSVQELCAGLDASCSRSSAAVFCPLSCWARFACALTGCLAGHPCLSLSVVRLFFSVSCPMWALCASKWPPGLGSLLAVRNKRV

SEQ ID NO: 367935 - protein, 77 aa, Zea mays
  Clone ID: MRT4577_98729C.1.pep
LMFELQTCSILPYGQNWQMMRIKDNCVCCAPYSSGHNVMMTMSRGISDANVNFLIYSISSKSLDVLAFIYILLLLCI

SEQ ID NO: 367936 - protein, 72 aa, Zea mays
  Clone ID: MRT4577_9872C.1.pep
GLLNRMTGRQFVRKIVSLLEMSMNARISLDGQSDRVLCSNNERCTFRYVFICIRPVLCVCECVFALNIPPPL

SEQ ID NO: 367937 - protein, 284 aa, Zea mays
  Clone ID: MRT4577_98730C.1.pep
KEDNIRRGLFDLLQNIVLIRDPEDSTKFYPRFNLEDTSSFRDLDEHSKNVLRRGYYNYYFVRQENLWRQNALKTLPVLLNSSDMLACGEDLGLIPACVHPVMQELGLIGLRIQRMPSEPNLEFGIPSQYSYMTVCAPSCHDCSTLRAWWEEDEGRRSRFYKTVVGSDEEPPSRCTPEVVHFIVQQHFDAPSMWAIFPLQDLLALKDKYTTRPAPEETINDPTNPKHYWRFRVHVTLESLLNDKDIQATIKDLVTSSGRSFPGKKAEGADESGEKLSKVQLNGKA

SEQ ID NO: 367938 - protein, 83 aa, Zea mays
  Clone ID: MRT4577_98732C.1.pep
GPRVFSFSPIYPTPERVATGDAFRSPQFPSSGCATTPIRILSPARSLYSGGGDDDSTALLTTQRCNEGMNFHDLEAAHDRGAP

SEQ ID NO: 367939 - protein, 144 aa, Zea mays
  Clone ID: MRT4577_98733C.1.pep
GSPPGYPFSPGNQNQAVVWGGTPLFGPPLSPKKALPGPQMVFPGLKKPPERAGPLGAPKEAPAWFYSPPFPLKENSFCRFIITLFCPFGAPRLGRGPPLRPRIFVLMGPGFNAQVGFFLPGPKNPFNPVGSPPPGKCQGPFLAV

SEQ ID NO: 367940 - protein, 114 aa, Zea mays
  unsure (1)..(114): unsure at all Xaa locations
  Clone ID: MRT4577_98734C.1.pep
GXTRARRQRXSGXXTSSXAAGVSSFRPTIRARVCGVGGCATXXAYRFXHGXXPGXXEESSXXVHLSSAEXGPXXRXLXRSXXGXXAXRFKXXRQVPXPSXASRSGERTPRWWAA

SEQ ID NO: 367941 - protein, 64 aa, Zea mays
  Clone ID: MRT4577_98735C.1.pep
HALLVCRVIAGRIPAPLEKLSQDFAVQPGFDSVAGQVGDDSSIEELYLLNPSALLPCFVVICKD

SEQ ID NO: 367942 - protein, 34 aa, Zea mays
  unsure (1)..(34): unsure at all Xaa locations
  Clone ID: MRT4577_98736C.1.pep
GSINGRVQLTRILFRRCYYIYTPRXFVVLSTXLR

SEQ ID NO: 367943 - protein, 112 aa, Zea mays
  Clone ID: MRT4577_98737C.1.pep
AKRLRGQSRSTRKPSHKTNIKGVRAENKNYYGLGIPNSGGASQARPDMETKPIVNKAAPPGGFFRKDPHATTSTGLSICLLGGGAAKLLSFVKSFLSTYTHPLADIWVYLQG

SEQ ID NO: 367944 - protein, 232 aa, Zea mays
  Clone ID: MRT4577_98738C.1.pep
QREEIGTGEANGGGAALRGSAGEVDSSVEDKVIAAEQFSPTYIGAQVTATELSENHLINCGSSENVLLEDTGPQMDASELSENGLVDCTSNSIEIVNESSGTELLIALTNGSQNIVERPAEREDSIDEYQDASPFLHPSDSEDGAAPSSAFSTEMSNLNAIPSGSSVTTDVNSLGTNGLLKDQISGEPNMTEISADSKAGRNLEEGALRLAKHEVNLKLGGPYEQSVNVDYT

SEQ ID NO: 367945 - protein, 481 aa, Zea mays
  Clone ID: MRT4577_98739C.1.pep
MERVIGGKYKLGRKIGSGSFGELYLGVNIQNGEEVGIKLEPVKTKHPQLHYESKVYMLLQGGNGIPHLKWYGVEGEYNVMVIDLLGPSLEDLFNSCHRNFSMKTVLMLADQLINRVEYMHSKGFIHRDIKPDNFLMGLGRKANQVYIIDYGLAKKYKDLHTHKHIPYRENKNLTGTARYASVNTHLGIEQSRRDDLESAGYLLLYFLRGSLPWQGLKAGTKKQKYDKISEKKMLTSAEILCKSYPPEFVSYFHYCRSLRFEDRPDYSSMKKLFRDVFIREGYQFDYVFDWTALKYPQMGSNNKLVQQPSARMAGVGPSVERTDKASMGQEIRDRFTGAVEAFARRNPGSGRPADHSSHSRHKSFADSFGTSNEAVADSSEKTRILSRGGSSSKMPAAPSTRPTSSGDCSDQNRRWVSGSSGGSGRPSPAQRLHHSGGAENSRSSPRSPVARNAAGRGGSGSRDSTTFRSLERLSITTSRRK

SEQ ID NO: 367946 - protein, 60 aa, Zea mays
  unsure (1)..(60): unsure at all Xaa locations
  Clone ID: MRT4577_9873C.1.pep
FFLXXXXFFXREIMFXXIHLPLETGVIGEIQTAVVNGXSFPHSLXISGIFAPSXSSSCXS

SEQ ID NO: 367947 - protein, 106 aa, Zea mays
  Clone ID: MRT4577_98740C.1.pep
ERSICNFQYSSVLLFVVVLVTRVCLVSHVISWSQGIPDCNVLHHALFCALWFLRYYIVYIHMMLRFVVKFGLTAMVSAEGWWFLVACSVSLKHLSSLLSVVVILWE

SEQ ID NO: 367948 - protein, 68 aa, Zea mays
  unsure (1)..(68): unsure at all Xaa locations
  Clone ID: MRT4577_98741C.1.pep
MERVIGGKYKLGRKIGSGSFGELYLGVNIQNGEEVGIKLEPVKTKHPQLHYESKVYMLLXGGNGIPHL

SEQ ID NO: 367949 - protein, 151 aa, Zea mays
  Clone ID: MRT4577_98742C.1.pep
MEHVIGGKYKLGRKIGSGSFGELYLGVNIQNGEEVGIKLEPVKTKHPQLHYESKVYMLLQGGNGIPHLKWYGVEGEYNVMVIDLLGPSLEDLFNSCNRKFSMKTVLMLADQLVSLFIPYSTLRCPATVRRQVNFLEFDNSYWLGVTCSEVS

SEQ ID NO: 367950 - protein, 77 aa, Zea mays
  unsure (1)..(77): unsure at all Xaa locations
  Clone ID: MRT4577_98743C.1.pep
WLLLVXPPSTRALVSTGGERVLGWIRPPTVGGPASASRGGGLRGRMNIPPSFSPCSRPPCSKYFNVRPRGSPRVFRP

SEQ ID NO: 367951 - protein, 65 aa, Zea mays
  unsure (1)..(65): unsure at all Xaa locations
  Clone ID: MRT4577_98744C.1.pep
SPPGLLCCVRPVCLGLVVXCFPGARSSVXGLGSVPVFALAVPGPWSSVAVPRVPSLPVVPPKCAL

SEQ ID NO: 367952 - protein, 70 aa, Zea mays
  Clone ID: MRT4577_98745C.1.pep
QHHICGCHPHPHPHHNKVECPRLPCLCRHRLHHHLVKHTQRKVPCGQCASCNCRPRMLVPFIYLPVTCPR

SEQ ID NO: 367953 - protein, 90 aa, Zea mays
  Clone ID: MRT4577_98746C.1.pep
RQHHRQPGLCKYRHWHGHLGFQIPRLPRNSGILMRIFLGRQAPPPHKHKLHTSLTAYVSWHAMLLFCNEIFYRLINIFLLINCFVSVLCS

SEQ ID NO: 367954 - protein, 198 aa, Zea mays
  Clone ID: MRT4577_98747C.1.pep
MHSFADEVEVSNVDVDSAATNFQHLSLQKEDQAAANSADDNPAVIIPDHLQLENTDCAHLSFGSFESGAFSGLLPSKVPKYSMEEVPNSDETPAVDQIDIRNQDYYDNGALQSSANEDVETRIGTNIENIDAPSVSQPDILMQGALDVSGLQYNPPSVSDHVYPNTTQPSIMESQQGNAQAQHLSHFSSLLAQQANTL

SEQ ID NO: 367955 - protein, 93 aa, Zea mays
  unsure (1)..(93): unsure at all Xaa locations
  Clone ID: MRT4577_98748C.1.pep
PKXLPRLPTLPHPWTPPPALPPTPGPRLRRPAHRSIQHCIVQRRFLSPPHSALNASPANHPPILAPSQAQHRGAHVPSSTATANPLRYVKRSK

SEQ ID NO: 367956 - protein, 246 aa, Zea mays
  unsure (1)..(246): unsure at all Xaa locations
  Clone ID: MRT4577_98749C.1.pep
MRRRAEVAVVGAGAAGLVAARELLREGLTVSVFEKSGRVGGTWAYSPRADADPLGSDPGGPGAVHSSLYASLRTNLPRELMGFSGFPLAGRAFAGDPRTFPGHREVLAYLDAFAADSGVAAHVRLRAQVLRVRPLCRGRGQGEKWAVAWRGEDGDVTEEAFDAVVVCNGHCSVPLVPKIRGINKWRGKQMHSHNYRTPEPFRDQSVVVVGLGASGIDIAREISHVAKXEVHISARYSEXRLGKIEL

SEQ ID NO: 367957 - protein, 45 aa, Zea mays
  Clone ID: MRT4577_9874C.1.pep
WPMKACVTTLTPYSVIRWKMAVPTMCHSFFDSTHHSSAVRLARPL

SEQ ID NO: 367958 - protein, 85 aa, Zea mays
  Clone ID: MRT4577_98750C.1.pep
MLDKLWDDVVASPQPETGLEKLRKATTARPLVINIDANGGSYKLAQSMPSTPTTPMTPSSSYSSTTPRGARNMWRIVLHTGINLA

SEQ ID NO: 367959 - protein, 660 aa, Zea mays
  unsure (1)..(660): unsure at all Xaa locations
  Clone ID: MRT4577_98751C.1.pep
GGSSPAKPGEGLRLDLTSLPSLGPKGSCIATNGAVSSIATHGSIECSHDRGCLRKXTNAVKHLTSTFXRIIHWYXLSSYSEARSVERTDRHSEVSSNAQLGVYTWXEDREQSGRVLVHCCQGVSCSTSLVIAYLMWREGQSFDDAFQFVKAARGIANPNMGFACQLLQCQNRVHAIPLSPNSVLRMYRMAPHSQYAPLHLVPKMLNDPSPAALDSRGAFIVHVLWSLYVXVGMKCDPVMEKDAKAAAFQVVRYEKVQGHIKVVREGLEPQEFWDAFSSMPPNSDSNTKISKDQIDSASKSDPGSRKNESYDADFELVYKAITGGVVPAFSTSGAGDETHLPAXRNDXWSLLRHTLVILFHRKGLSDALPIKVFKEHETENLLELLNFXLTLGGSYQDIVVAXKLTHPTNCHSTKACPPASVGTDDCQRGXSLYHPLPLNITGPTDRFHFSRSGGSTTAPRWSIFCPNGRMLPMGVVSAISQLGGNVSFSXLILGDGLSTVTXLPKHSCTSLKVNRFXSLWHINGNIVHNFKKKKAAKFEXHSETRLIERTDSNSEVCSNAQLVVYQWPSMGKLTTFARKDLDPKSVLIFVTSNAIRRGEAVKMVYVWVGGENESSKSVDSVDWQQVTSDFLHLKGLSNVLPVKVFKEHEAENLLELLNVS

SEQ ID NO: 367960 - protein, 75 aa, Zea mays
  Clone ID: MRT4577_98752C.1.pep
FNLPPPGFFNCALGFFRARTSDGCNPPSLYAFPFWVFKKKNKKKPPKKKKKKKKKKKQKKKKKKKKKKKKKKKKK

SEQ ID NO: 367961 - protein, 93 aa, Zea mays
  unsure (1)..(93): unsure at all Xaa locations
  Clone ID: MRT4577_98753C.1.pep
PSMEKLTTFARKDLDPKSVXIFVTSNAIRRGEAVKMVYVWVGGENESSKRVDSVDWQQVTSDFLHLKGLSNVLPVKVFKEHEAENLLELLNVS

SEQ ID NO: 367962 - protein, 390 aa, Zea mays
  unsure (1)..(390): unsure at all Xaa locations
  Clone ID: MRT4577_98754C.1.pep
FSLDFNDAPQEFWDAFSSLXTNTKIXKDQIDSASKSNPGSRIIESYDADFELVYKAITGGVVPAFSTSGAGDETHLPARESSWSLLRHKFISRSLARVYSDSALIRDFDPRVDRVQHLAAEASTSPPFLSPSSFSSDSSASSKYNSDSPSLSPTTSSPPSFGLSPASSNLPQALVPSSRSPLSQSSNAGASKPSGLESIRSPSKTSSIAERRGGFTLLKLPSLQKDLVLPPRVPSSIRRTDEALDKSCTNGVKRPTGDFRSENCTDNSSSLHSETRLTERTDSNSEACSNVQLLVYQWPSMEKLTTFARKNLDSNSVLIFVTSNAIRREAVKMVYVWVGGEIESSKSVNAVDWQQVTGDFLHRKGLSDALPIKVFKEHETENLLELLNFS

SEQ ID NO: 367963 - protein, 177 aa, Zea mays
  unsure (1)..(177): unsure at all Xaa locations
  Clone ID: MRT4577_98755C.1.pep
MSTSSTASIALAKTCPRLPNQMKAPVSLYLTTMRAICPRDGGEGYVGKFDTISLHVVIGDPEEYXSPXIYTHIETELISEEESEVPDSETKEXLSCSKDMEMRIIPSDPGQXHELYEEFCNCAELNPDAIAESDEEHVCEHDDELYDNTAHVSDTESAKADPIVQTVEHSINHDEIE

SEQ ID NO: 367964 - protein, 95 aa, Zea mays
  Clone ID: MRT4577_98756C.1.pep
WSPPTSSGTAPRPSPGSSASPNPDTTSASTDPHSKSTPAETEDDGRCVQTSSSIHTNTTTSINADHVSSITRTSMENPARARDAPPLVYGLCTFT

SEQ ID NO: 367965 - protein, 83 aa, Zea mays
  Clone ID: MRT4577_98757C.1.pep
QTCFGYKKKFIFFPENDSGAQKLYSFVPKKIIKPPFNPGRALFKYYRLPILIKAHHFKGGPTVGRLHLDLFGICPCQREEPQP

SEQ ID NO: 367966 - protein, 165 aa, Zea mays
  Clone ID: MRT4577_98758C.1.pep
APTCRWTRWSPPTSSGTAPRPSPGSSASPNPYVTPPTRSAQCLGRPSLLFTNACRLPPGRWSAAAWLSVLSDETKHSPRAALRPAVQYVMVSVNGSVPMSFAASEEPAAYGELVSIGGIGPGVNGKLSAAVAEVLEAKLSVSRSRFYIKFDDVRGHNFGFNGSTF

SEQ ID NO: 367967 - protein, 96 aa, Zea mays
  unsure (1)..(96): unsure at all Xaa locations
  Clone ID: MRT4577_98759C.1.pep
STXPVRLEDAPRQLQLQPQPHGLLRGRHRHVHVPSNRPAGQHAWPVPVLSTRQAGFIWYGLHIDGRHAYEERLLLGQLRLLAPCHTRGYNCYRDQY

SEQ ID NO: 367968 - protein, 106 aa, Zea mays
  Clone ID: MRT4577_9875C.1.pep
MPITVAVTVKSASLGVHTENGIYRVGHRCQLYGGRAHVAPCPDVPPPTPSPCTRTSSQLLIMVGRASSLETNTEVFDLSSVRNPCQNNQILHPSTPRPHIFPHHMP

SEQ ID NO: 367969 - protein, 108 aa, Zea mays
  Clone ID: MRT4577_98760C.1.pep
KGGFFLARGERLGIFFPPNGNKGSPLGVGFRFLIPVIVLGTVFVGSFPPEGVKKINCITFYFNGVFGFPFFLFLGGGFLWYSFFEAYRYFLVVGVKDLRGKFSGFGAC

SEQ ID NO: 367970 - protein, 83 aa, Zea mays
  Clone ID: MRT4577_98761C.1.pep
QLLSEQTALKRLKDLNYLKRQIRNPLYGIMFSRKLLEGTELGAEQKQFLQTSTQCQRQLSKILDNSDLDSIIDGNIAEPDVWT

SEQ ID NO: 367971 - protein, 74 aa, Zea mays
  unsure (1)..(74): unsure at all Xaa locations
  Clone ID: MRT4577_98762C.1.pep
RLWGYFIFGGGKTLFHSKTDSLHWGWLKPEGGGKALWGPGVMLETWGSLTIDVVQNWAHXPSPSPPSPLFHTKK

SEQ ID NO: 367972 - protein, 118 aa, Zea mays
  unsure (1)..(118): unsure at all Xaa locations
  Clone ID: MRT4577_98763C.1.pep
MDYGQQRARXHSATGHVIQYSYPVCEVEHGSGCMRHGTSTDSRMGQLGEHRGAIMGGGQIQPAREEHKTCSILHRSASCRCSSYEDDSLGGRRXRXIKVKIKEMLARCHKDDQHATVT

SEQ ID NO: 367973 - protein, 409 aa, Zea mays
  unsure (1)..(409): unsure at all Xaa locations
  Clone ID: MRT4577_98764C.1.pep
QPSTTASTPIPAPNPPPPSLSSSLRSLSLSSPRGRGRGAVGRHPLASTKIFRAAGCISRWFPLPPFSPAGDGEEYILRLEPFPCPPIEHRTGAKPLALVVASTPGQGSSGSTAAAVTSIAEQFLPDLLAAAERVKAEGAPKDELVKLSLVARLGTVLFECQPGGSPVSLDELRQAAKAGEDGSRSQLRKTFYTSLSSECLDDMERTMVKRIGLDFDSSKKHYHVKVSDKNRSDSTISCKCTVEEDGSLAIHKVELNQVLHLVEDISCLSKXLDLRLMLSKKRILKNLDSEVENAVKSLVSTAIIDPNVKGGVRWPLGKESIGERFSIVGVWHTDYKAFRNETMRLKLRHADRFDHRTSTGGVSDEVTFKLTAISCKLEEDDLAESAVKEMLESAVQMLWDNALNYRVVP

SEQ ID NO: 367974 - protein, 69 aa, Zea mays
  Clone ID: MRT4577_98765C.1.pep
RNNEKTRDFYKLKGSPFSFSQKENDIGINTIRVRFQADHKRHTGKNIQKINSRAIWHKAPTNLSHAHRK

SEQ ID NO: 367975 - protein, 48 aa, Zea mays
  Clone ID: MRT4577_98766C.1.pep
KEGIPPYQHRLIFAAKQLEDGRTLADYNIHNETTLHLDLRLKGSIPIS

SEQ ID NO: 367976 - protein, 62 aa, Zea mays
  unsure (1)..(62): unsure at all Xaa locations
  Clone ID: MRT4577_98767C.1.pep
FFFXEPSTGGKIKDLQPVIIVSYNYGASNKRMKMETTTTKVSSSSFPERAFSPCRSEQLMLP

SEQ ID NO: 367977 - protein, 44 aa, Zea mays
  Clone ID: MRT4577_98768C.1.pep
CQSLRQFQRIITIDNYSILWMNRGNHDLNYSILWMNRGNHDLSS

SEQ ID NO: 367978 - protein, 127 aa, Zea mays
  Clone ID: MRT4577_98769C.1.pep
MLPSLGLPRLSWMLLSCLMLLSQVQGEDSQRSERISCPRGSIAYGSSCYVLYKVARSWMSANIACQRRHSGHLASVLSGTEGSFLASLVRNNLNTQSDVWIGLHDPTEGSEPDAGGWEWSSTAMFNY

SEQ ID NO: 367979 - protein, 85 aa, Zea mays
  Clone ID: MRT4577_9876C.1.pep
EKPYLSKSADVFVCVLRERGDGEPAMSFWLFGLFLSSCGLYLFPCTLLPRIPTLNLYHASMIPKKTSKGAKVVQLSRIPNACMRR

SEQ ID NO: 367980 - protein, 233 aa, Zea mays
  Clone ID: MRT4577_98770C.1.pep
MMAEAWTPVLLPATAPCFWQQDTHSVLWRRGDAWTAEENKLFEKALAQIDRNAPDRWEKVAAVLPWKTVDDVRSQYHALEKDVGVIEAGGLVPFPRYSGSVPPPSGFALEDWGGGDRGFRRARGSEEMQERKKGVPWTEEEHKLFLMGLRKYGRGDWRNISRKYVTTRTPTQVASHAQKYFIRLSSGGKDKRRSSIHDITTVNLPGDAPRSSPPAATTNPSAGALVVDVKPFV

SEQ ID NO: 367981 - protein, 484 aa, Zea mays
  unsure (1)..(484): unsure at all Xaa locations
  Clone ID: MRT4577_98771C.1.pep
EDDDGLVILTVQARTQSLMPPQCAKPGAPCEPVSGAKKAMLFAGLYLTALGVGGIKGSLPSHGAEQFDEHAARGRKGRSTFFNYFVFCLSCGALVAVTFAVWVEDNKGWQWGFGISTIAILLSIPLFVAGSSRYRNKVPTGSPLTTIAKVLIAAALARRGCAPSSSNGXHRPRAQPHGEHRHXSTASPGTWRRSRSPTRRSPAAEPSRELALLNRAVQCQPPRHGRRLACTVQEVEDVKIVLMVLPIFLSTIMLNCCLAQLSTFSVEQAATMDTRVGSLTVPPASLPVFPVTFIIILAPVYDHVIVPFARRVTGTEMGITHLQRIGTGLVLSIVAMAVAAVVEVKRKNVASHNGMLEDSGKPLPITFFWIAFQYLFLGSADLFTLAGLLEFFFSEAPPRMRSLATSLSWASLALGYYLSSVLVSIVNSATGRGDHRPWLQGASLNHYHLERFYWVMCVLSTINYLFFLFLAVRYKYRNAGVIKG

SEQ ID NO: 367982 - protein, 143 aa, Zea mays
  Clone ID: MRT4577_98772C.1.pep
MMAEAWTPVLLPATAPCFWQQDTHSVLWRRGDAWTVEENKLFEKALAQIDRNAPDRWEKVAAVLPWKTVDDVRSQYHALEKDVGVIEAGGLVPFPRYSGSVPPPSGFALEDWGGGDRGFRRARGSEEMQERKKGVPWTEEEHK

SEQ ID NO: 367983 - protein, 124 aa, Zea mays
  Clone ID: MRT4577_98773C.1.pep
LRKYGRGDWRNISRKYVTTRTPTQVASHAQKYFIRLSSGGKDKRRSSIHDITTVNLPGDAPRSSPPAVTTATTNPSAGALVVDVKPFVPHPYGHVKLEPKSSLVVAGLGFNDSSVHLLMRCGQL

SEQ ID NO: 367984 - protein, 88 aa, Zea mays
  Clone ID: MRT4577_98774C.1.pep
KLLSRTPADKSWRNVSDFPYRLWMLHRAGTSGKIWHHGLTGWGVPPMHAVGDDSPKVLRWCTMMPYPGCIVAACGLRFTLLDQATGGC

SEQ ID NO: 367985 - protein, 338 aa, Zea mays
  unsure (1)..(338): unsure at all Xaa locations
  Clone ID: MRT4577_98775C.1.pep
MMAEAWTPVPFPPTAPCFWLHDTHSVFWRGGDAWTAAENKLFEKALAQIDRNAPDRWEKVAEVVRTKTVDDVRNHYHDLENDVGFIEAGLVPFPHYSGSVPSFGFTHHEDWDGGFRRGYCLKRARGSDPERKKGVPWTEEEHKLFLMGLKKYGRGDWRNISRKYVTTRTPTQVASHAQKYFIRLNSGGKDKRRSSIHDITTVNLPDEDRGNAPPSAVTTTTNPSVALPDMKPFIAPLQDALGVSHPYGNVKLEPKSSLVAGXLQRLRPPDALRTVVTGCSCGENRSRRNVRHQPPPHLSPGGHQGRRHKSHVVVLXAWMQSCFRCTPTDQMAGTSRRV

SEQ ID NO: 367986 - protein, 178 aa, Zea mays
  Clone ID: MRT4577_98776C.1.pep
HHVCGLKHWREHCHLWTDDLYAYYLYLQPDSARDDPHHGECDGNHYLPVHSPCWLRGGGADPTCRSTLPAAKAGSSLSHALAVALVGVRRRRRTYTWAPPGVGRAAVVRLRLAAGASDCARGVKGSCQSESSGLDNLDEERGRPHPAERSDGSLCSSVGAPRRRREAAASSGWCPVRR

SEQ ID NO: 367987 - protein, 157 aa, Zea mays
  Clone ID: MRT4577_98777C.1.pep
RSTYAGETATSKKKRRTPAWCDRILWRGDGIVQLSYYRGESRFSDHRPVCGTFAVEVEVRNKKTNRRSSNADMRIDAEELLPTGKGKRDENHVAREEERLVLQPDSQMPYVPSSLMFQRPALKMDGRFTGSAHNSSSPPMFPSHHPCQTANSSQPPV

SEQ ID NO: 367988 - protein, 81 aa, Zea mays
  unsure (1)..(81): unsure at all Xaa locations
  Clone ID: MRT4577_98778C.1.pep
RNIPVNQAQSPTGSGAAGDYPGGYGGGGYGGGPRHGGYSHGGGYRGGRKGSHPGYXHGAGYCGWPKGVVGASSSGPVVLRK

SEQ ID NO: 367989 - protein, 570 aa, Zea mays
  unsure (1)..(570): unsure at all Xaa locations
  Clone ID: MRT4577_98779C.1.pep
SHAATINSCRPGAVVPLLPTRPPTXSENIIEQSVWPILLAESLKALGGLGLLSLGGKYFIRRVFEFVAESRSSEAFVALCLLTVAGTSLITQKLGFSDTLGAFLAGAILAETNFRTQIEADMRPFRGLLLGLFFVTTGTSIDMQLLIREWPNVLSLLGGLIVIKTLIITAIGPRVGLTLKESVRIGLLLSQGGEFGFVVFSLANRLGVLPLELNKLLIIVVVLSMALTPLLNEVGRRVAGMIDERSEEKEKPAEMVNYGATEPVVILGFGEMGQVLAXFLFLRHLSAYHNFXFVQVLAKFLSAPLSFGIEKDTEGWPYVAFDLNPVVVKSARKSGFPVLFGDGSRPAVLQSAGITFPKAIMVMYTGKEKTIESVSRLRQAFTAVPIYARAQDLSHLLDLKKAGATDVVLENAETSLQLGSILLKGLGVMSDDVSFLSKLVRDSMELQAQEALKDIGDQEVDIMKPLQVRVSDLVESNGNSSRMVAPEQSLSLSSRPDIKAIKPPVANGIPDMKVENDKTGYDFDRVDSENGVTYCLLESDDQSDEASSTSKEMIDQSADTRVNVNDKKIL

SEQ ID NO: 367990 - protein, 70 aa, Zea mays
  Clone ID: MRT4577_9877C.1.pep
RPHELKNKPNSQKDMAGLSVSSLSQHTHKHKVDVRGEGFYLILIHGLVVYMQVWTIMRGKVDMVITGQTM

SEQ ID NO: 367991 - protein, 61 aa, Zea mays
  Clone ID: MRT4577_98780C.1.pep
LYSTTAVTAIPPTRSVVGENDRHWPYHLKSIRSQYDGSTPKVIDHRDQYPVYPRNNMDGYV

SEQ ID NO: 367992 - protein, 88 aa, Zea mays
  unsure (1)..(88): unsure at all Xaa locations
  Clone ID: MRT4577_98781C.1.pep
MARSVTGICLGVISLDVXLTITWLPQCQCXSRQPPENPITIFLNCYAPQFXPPQIEIELLKNGKKIPNIEMSDLSFSKXXSFYILAHT

SEQ ID NO: 367993 - protein, 148 aa, Zea mays
  Clone ID: MRT4577_98782C.1.pep
GESGLPLASRPGKGRGARGKVFGVGPAKKETSRISRAGFHFPVGRLARFLRGEKNREGVGPGPPGNLAAVLKNLGVGVLKFAGNPGGNKKKTRFGPRHFHFVGRNNEELPKLWGGAPFAGGGVLPNFLQIWLPKKVASSKARVNNNNN

SEQ ID NO: 367994 - protein, 57 aa, Zea mays
  Clone ID: MRT4577_98783C.1.pep
WHGPGLSIRHERTRPYGSGSFSSAGEVPARVYLAGRLCIIHSNSSEHPCRCRFPDGS

SEQ ID NO: 367995 - protein, 55 aa, Zea mays
  Clone ID: MRT4577_98784C.1.pep
IFIISLFIIYTFNDKITFFNFFTNIFSHASADAWADAWADAWAYAWVDPGLPDLY

SEQ ID NO: 367996 - protein, 71 aa, Zea mays
  Clone ID: MRT4577_98785C.1.pep
PRRAFLELHDPETVADAIVTDYVDDDPFFPFSGAFRLSQPDGGSQEPDATANVCYYPEDAYFYVGTTKDQE

SEQ ID NO: 367997 - protein, 195 aa, Zea mays
  Clone ID: MRT4577_98786C.1.pep
MVHVNFYRNYGKTFKKPRRPYEKERLDAELKLVGEYGLRCKRELWRVQYALSRIRNAARHLLTLDEKNPRRIFEGAALLRRMNRYGLLAEGQDKLDYVLALTAENFLARRLQTLVFKAGMAKSIHHARVLIRQRHIRVGRQIVNVPSFMVRVESEKHIDFSLTSPFGGGPAGRVKRKNQKKASGGGDAGGDEEEE

SEQ ID NO: 367998 - protein, 117 aa, Zea mays
  Clone ID: MRT4577_98787C.1.pep
RVDVLVLMILLMMIVLLMIATPMPSTTMTAPFAALGNFNGEILIKQVVRLYDLTDAWIVHNCLCIEYVKVETSSSLGPSVSVMLVVRLPAPLAVQVFSNRAIGPFIRCLSALYTTHY

SEQ ID NO: 367999 - protein, 90 aa, Zea mays
  Clone ID: MRT4577_98788C.1.pep
LQIKMSIDQSALTLSIGLPLGLAHIVSQIFLPSGVLKFWVHSLTQETFKSSAPSATHTDDDVATTRKRRATTTMICLFWAIKSVFLLLFL

SEQ ID NO: 368000 - protein, 85 aa, Zea mays
  Clone ID: MRT4577_98789C.1.pep
RGEGPHCFKGLAGFQKLAQGVGLEKKPSPLAILDKGFGERGFSSPGHPQNSLFETPPTLNTSPGAPTPVSFLGKEFMGSFKNRPL

SEQ ID NO: 368001 - protein, 89 aa, Zea mays
  unsure (1)..(89): unsure at all Xaa locations
  Clone ID: MRT4577_9878C.1.pep
KTSSQRCDNPPGLNPACXGQGXVDSIGGLKDYVAVLDDSKVXLLLCADVFXFEAPHLADLPDKVASTGDLAVPPDFFPVDPHVPENAEK

SEQ ID NO: 368002 - protein, 521 aa, Zea mays
  Clone ID: MRT4577_98790C.1.pep
MDSKSVGIVGAGVSGLAACKHALDKGFRPVVFEADGSVGGVWAHTLESTRLQAPTTAFRFSDLAWPPESAREAYPGHRRVMEYIRSYARAFDLLKHIRFHSQVLGVEYLGATEEEVMGWDQWSGDGTAFGAVKGGGWRLTVQDLKVGSTEVFVVDFLILCIGRHSGTPNIPEFPANGPELFKGKILHSLDYSYMDDGDAAEFVRGKRVTVIGSGKSAFDIAAEVAKVNGAAQPCTIVYRTRHWLVHKSSVWGVDLSYFYLNRISQLLVHKPGEGFLRCMLAAALSPLRWAISKAIETYYKWSVPLRKHGMVPDYSFSFAMSSCLIAMLPEGVGDRVDEGSIVLRKSKAVGFSSDGVVLRDRNESVRSDIVILATGFRGDQKLRDIFTANWCREIVAGSPDTAAPLYRECIHPRIPQLAIVGYSESLTNIYASERMSNWVAQFLAGGFQLPSVRCMEESVAEWAEYKNRYNGRYFRRSCVSTANIWLNDLLCRDMGCNPRRKKGFLAEWFQPYGPADYAGLC

SEQ ID NO: 368003 - protein, 75 aa, Zea mays
  Clone ID: MRT4577_98791C.1.pep
SPIFLCSGTVLSVSFLSRILPVCIRPVCYLLTVCSCSAVLLGCGRSGDPVALWPCLSQSCASSADRPCLASLEPN

SEQ ID NO: 368004 - protein, 65 aa, Zea mays
  Clone ID: MRT4577_98792C.1.pep
YVCQSKLEQERASVQSFIHAILLYSPLTLDIIIANPLGAGCLIRPEEYRLMVTLQTTKPSSVLLA

SEQ ID NO: 368005 - protein, 51 aa, Zea mays
  Clone ID: MRT4577_98793C.1.pep
ASILISSLTTLLMLPCIGFAMLLMDLSGRRFLLLGTIPILIASLVIWILQE

SEQ ID NO: 368006 - protein, 91 aa, Zea mays
  Clone ID: MRT4577_98794C.1.pep
PRGGGESQSNGPNWKKVLVAASVRPRSFKVILCGEVTIRVGMLNHPGETIKERVLGGVLCKVLILGPYPTLKISKARSKKKKKKRRPATGI

SEQ ID NO: 368007 - protein, 106 aa, Zea mays
  unsure (1)..(106): unsure at all Xaa locations
  Clone ID: MRT4577_98795C.1.pep
EKPGXPTRRPIXLSFTPGPTPVKTTPKPIRAEPVVVLVPDKQASLPKGNIVELQKKTIALLEEYFDIRILDEAYQCIVDLQSSDYYPKIVKKAVNFALYKGTNFVD

SEQ ID NO: 368008 - protein, 58 aa, Zea mays
  Clone ID: MRT4577_98796C.1.pep
KKKKGGKRTSNTKSQRKTIDTCIFTRGYARDASRNGALQPRTVPGLRGHGEGSHRAAS

SEQ ID NO: 368009 - protein, 98 aa, Zea mays
  Clone ID: MRT4577_98797C.1.pep
RSNACFLHHSYTHGDTISNLRAIYSSLYSLQHKRHRSQIHLQNDHPLLVFYQSVSYKIYSKQCLAIGAQLLAKYQLEHQRIYPHLSFYHIILHTINLI

SEQ ID NO: 368010 - protein, 261 aa, Zea mays
  unsure (1)..(261): unsure at all Xaa locations
  Clone ID: MRT4577_98798C.1.pep
MASLTVSTKTAAAGGNKQREGAEVITGAEACFAHSKQMLQALGFPGGVMPLRGLEECGWVRETGFVWMRQKAPYEHYFRGTGTRVRYDAEVTAYVEDGRMKRMTGVRSKQVMLWVPIVEMSLDGEKRDKIYFKSNVGIGRSFPASAFADEDEQAEEEEKKKNENKEENGDKPXPPPPPMPPASETETRARACCRRAGYCARLQGTVARRISRVTTREDARIYRLSLLLCVACPFSSFFFFQKMYYCLYLSIVACLPRLIHT

SEQ ID NO: 368011 - protein, 64 aa, Zea mays
  Clone ID: MRT4577_98799C.1.pep
VVVQRDVVHLDIIEDPAVDHASACPVAAPPPPCLRSRERCAATSDALVESVATPAARDETLGKT

SEQ ID NO: 368012 - protein, 70 aa, Zea mays
  Clone ID: MRT4577_9879C.1.pep
GKASKNVNWVPHKTSNGHRLPGVKHHKLDPYGGGGATSNTRLSTFYHPHIKHRGSHLWIGLYFPLQLTGH

SEQ ID NO: 368013 - protein, 136 aa, Zea mays
  unsure (1)..(136): unsure at all Xaa locations
  Clone ID: MRT4577_987C.1.pep
PSWEVNTHPPFPPPFLSYASTTFGRKGGQGANKPRGTLTQGETADTFGNHSSKEGLKKKNDNQRTSTHSKGYQGRRDDXASLGGTSGDETNXYINEARRNKHTDALVRQSGNTAQAPAEKVESTEDPSAPTPDDAE

SEQ ID NO: 368014 - protein, 94 aa, Zea mays
  unsure (1)..(94): unsure at all Xaa locations
  Clone ID: MRT4577_98800C.1.pep
LFPKTLIQLSIRKIGTPQGTGHKINSRLNRSLVGGRPLKFLLFLFSPGPPXFFFFFFFFFFFFFFFFFFFIQHSTSLMLVNIANVQQIEFDCTT

SEQ ID NO: 368015 - protein, 108 aa, Zea mays
  Clone ID: MRT4577_98801C.1.pep
MAAQLRLQDSKEKFQAAYNAAVTQKESSEKDWKDEKEAGMHDQEFDQWFPINAPAYAVAFQQYRGARAAYEAALHAVDEQAARSWQEKVRQAVIDNKLDYNILIGPDE

SEQ ID NO: 368016 - protein, 51 aa, Zea mays
  Clone ID: MRT4577_98802C.1.pep
MAFKATPVKKAPKDTPALFSRRTIALGVEPAIASTINKVKTGKQPHNSTQE

SEQ ID NO: 368017 - protein, 102 aa, Zea mays
  Clone ID: MRT4577_98803C.1.pep
DAWVFFFFFFFFFFAAFYFLVGFFLARGGLKPTTGFGFIIFQSWEHQTKSFYFFFAKQKPSGGKARPGLRNQGAFHGFCFTVHKNSLFEGAPYCKTHFEQLF

SEQ ID NO: 368018 - protein, 122 aa, Zea mays
  Clone ID: MRT4577_98804C.1.pep
ERGRERNLEASSPIKARPNITRDPNKKSSLLLQKKRTCSDRRTTEMSGSCTEEQRGELQELEFLNISKLFNSLESSNAVLLFSHVNMNGELASPVASSLPSVVFFFYPLVLYERSVDILSGA

SEQ ID NO: 368019 - protein, 103 aa, Zea mays
  unsure (1)..(103): unsure at all Xaa locations
  Clone ID: MRT4577_98805C.1.pep
PPRSCVSMHDDIRHXPENPKSVDIINHAYGGDIDSRAPXDYTEXEVYVDNGFIVMLVTXTALRGGSYXEVDRDPNDHILIIYRDHGGPAVLAMTTYAYLYRDD

SEQ ID NO: 368020 - protein, 122 aa, Zea mays
  Clone ID: MRT4577_98806C.1.pep
ERGRERNLQEVSTIKARPNITRDPNKKSSLLLQKKRTCSDRRTTEMSGSCTEEQRGELQELEFLNISKLFNSLESSNAVLLFSHVNMNGELASPGASSLPSVVCFFPSLVLYERSVDILSGA

SEQ ID NO: 368021 - protein, 225 aa, Zea mays
  unsure (1)..(225): unsure at all Xaa locations
  Clone ID: MRT4577_98807C.1.pep
RPSKISSRQLLPPCSTTAAASAQEAGPAAMAPPAFFPTLSSSFPRCCLHQHSPSHGNQQPWRPPSQASLPSSAALPWMKPGAPSSFSTAVGTPTPPSAPHPSRGGRRALCSSFGERLQQGAFFPSGASALPPQRPFFFHGLQQLDPPLHGASFIFQSRRSSSSWRPHSLLHLLSASSHPPKTASAGAFFPMEAEPPAPSRDAQIFSSREPLPMGATXCSFPLPAP

SEQ ID NO: 368022 - protein, 48 aa, Zea mays
  Clone ID: MRT4577_98808C.1.pep
NPASQSLANQPVQVPRLYLQKGQGSIGKSRHRPTFNIIKKSPPWCRSP

SEQ ID NO: 368023 - protein, 61 aa, Zea mays
  Clone ID: MRT4577_98809C.1.pep
KNQNLPGLHEGLCQVVRKVQSCKKAQRRRFLGKVKNGGLNNVGAAHKECGVCKQNFFFFFF

SEQ ID NO: 368024 - protein, 96 aa, Zea mays
  unsure (1)..(96): unsure at all Xaa locations
  Clone ID: MRT4577_9880C.1.pep
NRREICKYIFHHEDLYAKKDYNVANHPKLDTPNLEVIKLMHSLNFKEDVRETFSSPDYYXHLTNDGHEHLRSFLNLPREHVPNTLKKGCKPPCLPF

SEQ ID NO: 368025 - protein, 80 aa, Zea mays
  Clone ID: MRT4577_98810C.1.pep
MACSKAVLLAALLAVAGALSSAAVWEDYDHHMYHRCYRSCMRKCVDDDADDALKNSISPVATSVSDDRDHDHDDHHDDHD

SEQ ID NO: 368026 - protein, 95 aa, Zea mays
  Clone ID: MRT4577_98811C.1.pep
FKLDSQAQDVSCTSFEAHQVGVDGGTHTDIADDNHYRSHGFGGGAEHGFFGNQCDTKEWDFGLSIGWEKHDFLSTNNVIEEVFGKCCDTADQDLI

SEQ ID NO: 368027 - protein, 39 aa, Zea mays
  Clone ID: MRT4577_98812C.1.pep
VGLSHTPKGKWFCTKYRGESEKTMDKALEKSKKERAYNR

SEQ ID NO: 368028 - protein, 95 aa, Zea mays
  unsure (1)..(95): unsure at all Xaa locations
  Clone ID: MRT4577_98813C.1.pep
ASFKALHSEXNDLSIQDDTLQGXVSSVDVATEEKMEKLARVRDMLLKKPVSQANLETGYMVRACHRTELTNDEALKRFAKLLSDERQIRKARWPK

SEQ ID NO: 368029 - protein, 90 aa, Zea mays
  unsure (1)..(90): unsure at all Xaa locations
  Clone ID: MRT4577_98814C.1.pep
GDPNYLHRLPTLFCMPVPHDVCAQDITTTHMLPTVLRMAAATVANVXRFNVAQSLQKIEAILDNSPLPSEVKHILEXLTQDQDVDVKYFA

SEQ ID NO: 368030 - protein, 102 aa, Zea mays
  Clone ID: MRT4577_98815C.1.pep
GRVGGRVGEWSKLEKKGPQIILDRHPHNPYLGINCSTSKYLSTSLLQTTVHNLSASLLQSTTEEENYPTDNSLYATTVLLGTLFTIVNIIIGCKFLSFYIIA

SEQ ID NO: 368031 - protein, 76 aa, Zea mays
  Clone ID: MRT4577_98816C.1.pep
NATIIMSHCTKNGNSIIAVLVGLGYIARRRTYALSYVQLQGVRIVWLPAKRACGGSGRPQRLNVRTAPAILYQRIQ

SEQ ID NO: 368032 - protein, 134 aa, Zea mays
  unsure (1)..(134): unsure at all Xaa locations
  Clone ID: MRT4577_98817C.1.pep
MSGGSTKREMETGTSHGKAPSTESGTKGREESPPRVKSHKSDDKKKKMKKVVYYEIDSSLPSGSDALSVNSKRHERKKFSKIPLRYPHISKRAPLLSVPLGKPPVFXGEDYXVPSVGDEGYDSDEVAQICHFNS

SEQ ID NO: 368033 - protein, 84 aa, Zea mays
  unsure (1)..(84): unsure at all Xaa locations
  Clone ID: MRT4577_98818C.1.pep
LEGGGKMXSFCSTSFMLADAAREPACISLTSGAVHVMRYLHLLLQSHYDLNDVSRRTRYGAWAALLXLQPFGSENCTLMSGKWK

SEQ ID NO: 368034 - protein, 176 aa, Zea mays
  Clone ID: MRT4577_98819C.1.pep
GGVRYREISGAHRKLTARIQGLRGRVAAGEACNIDYYLLLGVRRGCTRSELERAHLLLSLKLKPDRAVVFGERLELVDEHRDLEAVRDQARMSALLLYRMLQKGYSFVMSAVLDEEAAERQRAKDAAEAAAAAAAAALAAKQEAAKQEPPQQPVVPEKSKNTETERGRPRSPPGRA

SEQ ID NO: 368035 - protein, 126 aa, Zea mays
  Clone ID: MRT4577_9881C.1.pep
RPRVRLRVGQQMRLIDQTDARVHRTLMRTVVGQVGRMAETIVLPVELLRQLKPAEFGDTDEYHQWQFRQIKLLEAGLILHPSLRLDRLHSDVLRIREVMRATDIRAIDTSKNSDVMRALSNAVHAL

SEQ ID NO: 368036 - protein, 31 aa, Zea mays
  Clone ID: MRT4577_98820C.1.pep
GKCAMWSCYWTPSLSYVKKTSNQTLSSSTMK

SEQ ID NO: 368037 - protein, 104 aa, Zea mays
  unsure (1)..(104): unsure at all Xaa locations
  Clone ID: MRT4577_98821C.1.pep
TEEEALASLGMGKFHASVLTNLGMXLKAXAKEKRLLSLHEQSLKARGGFSAQEEGXINKXVFAEILVRTYAWSFTANDSGRRGGFNSTAIDTGGAILLRAMAPN

SEQ ID NO: 368038 - protein, 88 aa, Zea mays
  Clone ID: MRT4577_98822C.1.pep
KKLPPPIPGESPQHFQALGSTSKKRKGKVPGSTAPFKPLGPNKTGSWGALKWFCSPQNGNFKGGQAPLESEDRHWAQNWGIKGFLSLF

SEQ ID NO: 368039 - protein, 110 aa, Zea mays
  Clone ID: MRT4577_98823C.1.pep
SSFFFFFFFFFFFFFFFFFFFFFFFFFLKGGGGFFKGKKTGKGGSPPTRNPGNLENKPNFGKGGFFGFGGPPHPGEKKKRTLPWTPGNQGPYHNWLQPDGSPQKRGTPPF

SEQ ID NO: 368040 - protein, 225 aa, Zea mays
  unsure (1)..(225): unsure at all Xaa locations
  Clone ID: MRT4577_98824C.1.pep
DTQDIHRPVLDHHGQTEDTAASTLLGLSARAGTATILSQCLQALIASVLRAYLSRAACWGRENSRGEPYRNQQAXVHAVMLPSSPLILQQXYALLQELPLAHXLAHNIRGQQLQQRALANLDAHYQEQQLLAFNQLAVXNSACYLERQQLPYSQVSGDYQQQXVPFHQLTAWNXTAYLQKQHLLPFRQLAGESPATFVTHTHMXSLYQHAAPNAGTLLQLQELLA

SEQ ID NO: 368041 - protein, 57 aa, Zea mays
  Clone ID: MRT4577_98825C.1.pep
AKRIWKREQFASFEGCATRLAESTHGPHASAERIWNREQLASLEGCSNRLDKVVPMA

SEQ ID NO: 368042 - protein, 87 aa, Zea mays
  unsure (1)..(87): unsure at all Xaa locations
  Clone ID: MRT4577_98826C.1.pep
LLVAGALVAGVALRXLGLXXLLARCWVPRGRFXXRRPRFLARCWVGRXGRWARAWFAXXFGGGGRPCCXLPFARXXXVXXRVGXRVG

SEQ ID NO: 368043 - protein, 140 aa, Zea mays
  Clone ID: MRT4577_98827C.1.pep
QDPADNPSCDGYFSTENPAPPPPPPPATPNPHTPGDSSPSSIPHPSAPQLLPSPPPHTPDDSSPSSTPHPSAPQPPPSPPPPSADASPPLSRQGETSPPRPSPPPSPAPVSPPTPAPASSEAGGTSRSRRRRNRLANRGA

SEQ ID NO: 368044 - protein, 84 aa, Zea mays
  unsure (1)..(84): unsure at all Xaa locations
  Clone ID: MRT4577_98828C.1.pep
NFQQATPISKAIITKYCMSKHVCLVSYNYQDHXRALAHKPDLLSSXDVKNFLENAYSNSNTSFSKHNIKLHALXNPLFLHENLS

SEQ ID NO: 368045 - protein, 85 aa, Zea mays
  Clone ID: MRT4577_98829C.1.pep
DPPPPPDEPRIKDPEAPVGPPPPVPCERGSLSHRENALCLRASTLARKKCKRSVCGAQNTPVLDDRLNNNKEETPPVCRWVFLWA

SEQ ID NO: 368046 - protein, 169 aa, Zea mays
  Clone ID: MRT4577_9882C.1.pep
PKRRSTPKKTKKNCSMITEILKVWLILQMGHFMSNFSTFLVAIIVAFACCWEVGLLSLLVVPMLLMVGASYSKAMISMSLARTSFVSEATAIVEQVPAHQLYRPPSPPLLFGPSSIRAPRTVAQNSYPTGGWLARSRCSCSCSCGERVATMVPLHVGEREEWGRCAADD

SEQ ID NO: 368047 - protein, 119 aa, Zea mays
  unsure (1)..(119): unsure at all Xaa locations
  Clone ID: MRT4577_98830C.1.pep
PPTMGYEKCHINIADIVHVXSVKXTSTGHXIIYKLEQRCKLAIDMXDKEAAEMNKRAFKYTRMLDXLKGDRERCITIAIGLXKFETTKYYCTRIDSPGHRHFLTNMNTGTSQADCAELI

SEQ ID NO: 368048 - protein, 760 aa, Zea mays
  Clone ID: MRT4577_98831C.1.pep
MSGAHRIVRCPLLAVGLATCPAQIARPTIGPDDRWLTGQSGAHRTVRFTFKHLCWHSITKIHRNDLRAHFPFSPGSVFCFGTISSVADEEGILHRIADPPERESPSTNSENTGEAQPPALRKKIVSGKSGAEGSLTRKTPLSTSPTKEWTRIARKKETREKQIVLSIPPASKENEKKDATTAAPFYPDVLFIGRVESPTVSDDEPTAPGEEPPQRESRRWRNQRRNVRRHHAAGELDPEQPVSRDEVSEIGETLEERVFRERRNSRRRDCRRAQEQAEQDARQRRENPFFRRNLNPDFARAMNTLSEVGGQHENEIRRQEEYDRDHGVPAQSQATRTESATASTGGTTQGRSRNHNHNSPPRDRHRPRRQEDTCRVSALTPRLRAIQWPPNFMVSNVDKYEPKQDPGGWLAVYTTAARAAGASEDVMTAYLPIVLGQDALQWLRHLPRHCIDNWGDFSRRFTANFQSLSDKPAQPWDLKSIKRRGDETLRSYLKRFQTMRNRIPEENKRQQKLNDRQILVATTGPPAPYRWSEHPITFTREDQWLNFDHPGKYPLLVDPVIRESRVKKVLVDGGSSINVTFPRTLQGLGVHLKELHESDTPFFSIVPTEGEYPLGHIYMPVTFGTLENYRTEFLRFEVANFDCGYNAIIGRPGLAKFMAIPHYTYMVLKMPGPQGIITVRADFQGAAECFRVAIQAALNTKPSTVSSTPANSKPRENLAVPANEAQAVTSMRPTEDTKRINLGFADERKTAIISSSLDDK

SEQ ID NO: 368049 - protein, 589 aa, Zea mays
  unsure (1)..(589): unsure at all Xaa locations
  Clone ID: MRT4577_98832C.1.pep
MVVTFYSKITMRPGSVFCFGTISSVADEEGILHRIADPPEKKPPPTNSENAGEAQPPALRKKIVSGKSGAEGSLTRKTPLSTSPTKEWTRIARKKETREKQGDFSRRFTANFQSLSDKPAQPWDLKSIKRRGDETLRTYLKRFQTMRNRIPEVTEAAVIEDFYRGSNDLAFVRAILQKAPTTSEELFREADLYITADERAQGLIGGAKPASAAPRRDANQPPDKCWEKRPREEVHVAGPPASRARGGPRGGERTLDDILDAQCPYHKDMRHTLRNCRDFKXRWAWPTLPTSTSXPPRGGPDEPRQPHQPEEGGGGAFPRVDREVNVIFGGHGSQENKRQQKLNDCQILVATIGPPAPYRWSEHPITFTREDQWLNFDHPGKYPLLVDPVIRESRVKKVLVDGGSSINVTFPRTLQGLGAHLKELHKSDTPFFGIVPTEGEYPLGHIYMPVTFGTPENYRTEFLRFEVANFDCGYNAIIGRPGLAKFMAIPHYTYMILKMLGPQGIITVCADFQGAAECFRVAIQAALTTKPSTVPSTLANSKPEEDLAVPANETQAATSIRPTEETKRINLGFADERKTAIISSSLDDK

SEQ ID NO: 368050 - protein, 306 aa, Zea mays
  Clone ID: MRT4577_98833C.1.pep
MECLTTSFPRNVGKEYSCSSKLVSRNQWTPKRICCYVSCSTNSSRCHKFTDVACPMSPVIRKRLRWRCFAASLNLEDGPAPSDSTSSSSEQTTDADGTTNGDVSENLLSRKPSSDELKALLADSERSKLLRRLSEANQYNRFLKRQLQIKDDAVVKFKGELAVLELELQALVGLAEEVANFDVPLGSRKINGKYIQSHLLSRLEAVHDKIMEQVKSVDALKTQEVIPVYWIGMAENVQIMGSFDGWSQGEAMSMEYSGDYGRFSATLKLRPGRYEIKFLVDGEWRLSPEYPTAGDGLTQNNILVVE

SEQ ID NO: 368051 - protein, 598 aa, Zea mays
  Clone ID: MRT4577_98834C.1.pep
MAITFHNKITLRPGSVFCFGTISSIANEEGTLHRIVDPPKKKSPPTNFENTGEVQPPALRKKIAFRKSGAEGPLTRRTPLSTSPTKEWTQVARRKEAGRKQAALSVPPPSKESGKKIVTTAVPFYPDVLFIGRVESPPFSDDEPTAPGEEPPQRESRRRRNRRQNIRRHHEAGERDPEQPVSWDEKAPTTSEELFREADLYITADERAQDLIGGAKPAPAAPRRDANQQPDKRWEKRPREEVHAAGPPASRARGGPRGGERALDDILDAQCPYHKDMRHTLRNCRDFKHSVGHGRPFQPLPPPPPRGGPEEPRQPQQQEEGGGGAFPRVDREFNVIFGGHGSQENRRQQKLNDRQILVATTGPPAPYRWSEHPITFTRADQWLNFDHPGKYPLLVDPVIRESRVKKVLVDGGSSINVTFPRTLQGLGVHLKELHESNTPFFGIMPTEGEYPLGHIYMPITFGTLDNYRTEFLRFEVANFDCGYNTIIERPGLAKFMAIPHYTYMILKMPGPQGIITLRADFQGAAECFRVAIQAALTTKPPATSSAKANSKPEEDLASLANEAQAATSMRPTEETKRINLGFADERKTAIISSSLDDK

SEQ ID NO: 368052 - protein, 39 aa, Zea mays
  unsure (1)..(39): unsure at all Xaa locations
  Clone ID: MRT4577_98835C.1.pep
LDGKHVVFGQVVKGMNVVTAIXKVGTRIGSTSKVVKVAD

SEQ ID NO: 368053 - protein, 79 aa, Zea mays
  Clone ID: MRT4577_98836C.1.pep
PSRQRDKPGGWTYRYSAERLVLFMTYVLELGVAAQTDGELEGSAAVSKRGQVPCMNSFDLRSVRHAYIERRVSCCTENY

SEQ ID NO: 368054 - protein, 1558 aa, Zea mays
  unsure (1)..(1558): unsure at all Xaa locations
  Clone ID: MRT4577_98837C.1.pep
MAVTFHRKITLRPGSVFCFGTISSVADEEGTLHRIADLPRKKSPPTTSENVGVRQGKVQPPALQKKIAFSKPEAEGPPTRRTPLSTSPTKEWTQIARKKETNKTGRKQVVLSVPLPSKENGKKIALTAAPFYPDVLFIGRVESPPVSNDEPTAPGEEPPQRESRRRRNRRRNIRRHHEAGERDPEQPVSRDEVSEIGETPEECVFREWRNSRWRDRRWAQEQAEQEARQRRENPLFGRNLNPDFARAMNTPSEVGGPTIFYLSLTRRTTYDTPSTVAGTRGAPSMPRVNGNMRMRSAARKSTIGTTTSQPGVRPPELSRQRPRLAIPPGDGRGTTTTTPLPGTDIIPDDRKTRVECLHLLHALGPFNGPLTSSDFSRRFTANFQSLSDKPAQPWDLKSIKRRGDETLRSYLKRFQTMRNRIPEVTEAAVIEDFYRGSNDSAFVRAILQKAPTTSEQLFREADLYITADKXSGPHRRXKPAPAAPRRDTNQQPDKRWEKRPCEEVHAAGPPASRARGGPRGDERTLDDILDAQCPYHKDMRHILWNCRDFKXRRTRLALPTSTSXRRREDQENRDXQQQEEGGGGAFPRIDREVNVIFGGHGSQENRRQQKLNDRQILVATTGPPALYRWSEHPITFTRADQWLNFDHPGKYPLLVDPVIRESRVKKVLVDGGSSINVTFPRTLQGLGVHLKELHESDTPFFDIMSTEGEYPLGHIYMPVTFGTLENYRTEFLRFEVANFDCGYNAIIGRPGLAKFMAIPHYTYMILKMPGPQGIITMRADFQGTAEYMPGVPRELAEHKLKVYPQARPIRQKLRRFTPDKREAIRAELARLVAAGFIREVLHPEWLANPVLVLKKNKVDWRMCVDYTDLNKHCPKDPFGLPRIYQVVDSTVGCSVLSFLDYYSGYHQISLAKEDEEKTAFITPFGAFCYTSMSFGLKNAGATYKRAIQTCLADHWGKRVEAYVDDVVIKTENSENFIEDLQLVFNSLRRYRWKLNPEKCVFGVPAGKLLGFIVSHQGIEANPDKIEAIMKMEAPRSQKKVQRLTGCMAALSRFISRLGEKGLTFYKLLKKVDKFQWTSEAQEALDALKKILTTPPVLKPPRRATSTQPTEDLLLYISCTTHVVSTALVVKRAEEGHAYPVQHPVYFISEVLGPSKKKYPQVQKLLYAVLLTARKLRHYFDDHKVIVVAGFPIGDILHNKEAISRIAKWACELGSHDIEFRPRTAIKTQALVDFVSEWTEQQIPDNPETAKVWRMYFDGSLKLHGAGAGILFTAPGGEHLRYALQLLFPASNNAAEYEALIHGLNIAMSLGIKRLMVYGDSLVVINQINKEWDCSSDSMGKYCTAVRKLEDKFEGLEFHHVERDQNTAADVLSKLGSSRTQVPPGVFVQEIPHPSISLDQAEECNTVSQSESDSDDWRRPIIRYIKNEEKPDDKNAAERIARQSAHYTLIGETLYRRGASGILMKCILSSTGKQLLDEVHAGQCGIHAASKTLVGKAFRSGFYWPTAKSDAAELVQRCEACQYLSKQQHLPAQQLQTIPVTWPFACWGLDMIGPFQKAQ

SEQ ID NO: 368055 - protein, 776 aa, Zea mays
  Clone ID: MRT4577_98838C.1.pep
MVVTFHRKITLRPGSVFYFGTISSVADEEGTLHRIADLPRKKSPSTTSENVGVRQGKAQLPALRKKIAFSKPGAEGSLTRKTPLSTSPTKEWTQIARKKETNKTGRKQVVLSVPPPSKENEKKIATTVAPFYPDVLFIGRVESPPSPTTSRPRPDKNLSGNPADGGTDAEMSGDITRPESGTQSSLSRETRAIDDCSPKQPTIFYLLLTHRTTYDMPSTAAGTREAPSMLRENDDMRTRSAAGRSTIGIMASQLGVRPPELSRQRPRLAVLPGDGRGTTTTTPLPGIDIIPDDKKTRVECLPLLHALRPFNGPLTSSDFSRRFSANFQSLSDKPAQPWDLKSIKRRGDETLRSYLKRFQTMRNRIPQVTEAAVIEDFYRGSNDSAFVRAILQKAPTNSEQLFREADLYITADERAQDLIGGAKPAPAAPRRDANQQPDKRWEKRPREECPYHKDMRHTLRNCRDFKHSVGHGRPFQPLPPPPPRGGPGELRQPQQQEEGGGGAFPRVDREVNVIFGGHGSQENRRQQKLNDRQILVATTGPPAPYRWSEHPITFTWADQWLNFDHPGKYPLLVDPVIQGSRVKKVLVDGGSSINVTFPRTLQGLGVHLKELHESDTPFFGIVPTEGEYPLGHIYKPVTFGTPENYRTEFLRFEVANFDCGYNAIIRRPGLAKFMAISHYTYMILKMPGPQGIITVRADFEGAAECFRVAIQAALTTKLSAISSTQANSKPEEDLAAPANEAQAATSMRPTEETKRINLGFADERKTAIISSSLDDK

SEQ ID NO: 368056 - protein, 738 aa, Zea mays
  unsure (1)..(738): unsure at all Xaa locations
  Clone ID: MRT4577_98839C.1.pep
MAVTFHCKITLRPRSVFCFGTISSIADEEGTLHRIADPPKKKSTPTHSENVGVRKEKVQPPALRIKIVFGMPGAEGLLTRRTLPSTSPTKEWTQIARKKEANKTRRKQVVLSVPLPSKENGKKIATTAAPFYPDVLFIERVESPPVSDDEPTAPGEEPPQRESRRWRNRRRNIRRHHEAGEWDPEQPVSRDEVSEIGETPEERVFRERRNSRRPLTPRLRAIQWPPNFKVSNVDKYEPKQDPGGWLAVYTTAARAAGASEDVMTTYLPIVLGQDALQWLRHLPRHCIDDWSDFSRRFTANFQSLSDKPAQPWDLKSIKRRGDETLRSYLKRFQTMRNRIPEVTEAAVIEDFYRGSNDSAFVRAILQKASTTSEQLFREADLYITADERAQDLIGGAKPAPAAPRRDANQQPDKRWEKRPREEVHAAGPPASRNRGGPHGGERTLDDILDAQCLYHKDMRHTLRNCRDFKHSIGHGRPFQPLPXLRRGEDQKNHDNPSSRXGEGGAFPCVDREVNVIFGXTDRRRTEDNKSSTIARYXATTESRVKKVLVDGGSSINVTFPRTLQGLGVHLKELRESDTPFFGIVPTEEEYPLGHIYMPVTFGTPENYRTEFLRFEVANFDCGYNAIIGRPGLAKFMAIPHYTYMILKMPGPQGIIIVRADFQGVAECFRVAIQAALTIKPSATSSAQANSKPEEDLTTPANEAQAATSMRPTEETKRINLGFADERKTAIISSSLDDK

SEQ ID NO: 368057 - protein, 45 aa, Zea mays
  Clone ID: MRT4577_9883C.1.pep
SRSACVFRWASSRRPASTKLRRLTCARPTRTCTRPTRRTPTTSGS

SEQ ID NO: 368058 - protein, 908 aa, Zea mays
  unsure (1)..(908): unsure at all Xaa locations
  Clone ID: MRT4577_98840C.1.pep
MAVTFYRKITMRPGFVFRFGTISSVADEEGILHRITDPPEKKSPPTNPENAGTAQPPALRKKIASGRSGAEGPLNRRTPLSTSPTTLFLRPQRRTERKSPRQQRHSTPTSSSSGEWSRLPSPTTNQPHPEKNHLNENPADGGTGAGTFDDITRLESEIQNSLSRETRERRNSRRRDRRRAQEQAEQDARQRRENPLFGRNLNPDFARAMNTPSEVGGVLARIADGLPRTPDAEGYRRLFTQAANHLLPLAHPPNDLRHAINSRRDARSSINASRERRHENEIRRREEYDRDHGIPTQSQATRTESATASTGGTTRGRSRNHNHNSPPRDRHRPRRQEDTCGVSALTPRLRAIQWPPNFKVSNVDKYEPKQDPGGWLAVYTTAARAAGASEDVMTAYLPIVLGQDALQWLRHLPRHCIDDWGDFSRRFTANFQSLSDKPAQPWVLKSIKRRGDETLRSYLKRFQTMRNRIPEVTEAAVIEDFYRGSNDSAFVRAILQKAPNTSEELFREADLYITADERAXTSSEERSPHXAPRRDTNQPTDKRWEKRPREEVHAAGPPVSRARGGPRGGERTLDDILDAQCPYHKDMCHTLRNCRNFKHSVGHGRPFQPLPPPPPRGGPDEPRQPHQQEEGGGGAFPRVDREVNVIFGGHGSQENKRQQKLNDRQILVATTGPPTPYRWSEHPITFTREDQWLNFDHPGKYPLLVDPVIRESRVKKVLVDGGSSINVTFPRTLQGLGAHLKELHKSDTPFFGIVPTEGEYPLGHIYMPVTFGTPENYRTEFLRFEVANFDCGYNAIIRRPGLAKFMAIPHYTYMILKMPGPRGIITVRADFQGAAECFRVAIQAALTTKPSTVPSTPANSKPEEDLTVPANEAQAATSMRPTEETKRINLGFADERKTTIISSSLDDK

SEQ ID NO: 368059 - protein, 455 aa, Zea mays
  unsure (1)..(455): unsure at all Xaa locations
  Clone ID: MRT4577_98841C.1.pep
MTAYLPIVLGQDALQWLRHLPRHCIDDWGDFSRRFTANFQSLSDKPAQPWDLKSIKRRGDETLRSYLKRFQTMRNRIPEVTEAAVIEDFYRGSNDSAFVRAILQKAPTTSEELFREADLYITADERAQDLIGGTKPTPAAPRRDANQPFDKRWEKRPREEVHAAGPPASRARGGPRGGERTLDDILDAQCPYHKDMRHTLRNCRDFKHSVGHDRPFQPXYRLLHPGEDQMNHDSPISRRRGEEEPSHALTGRSTSFSTDMGRRRXKRQQKLNDRQILVATTGLGVHLKELHESDTPFFGIVPTEGEYPLGHIYMLVTFGTPENYRTEFLRFEVANFDCGYNAIIGRPGLAKFMAIPHYTYMIMKMPGPQGIITVRADFQGAAECFRVAIQAPLTTKPSTVPSTLANSKPEENLAVPANEAQAVTSMRPTEETKRINLGFADERKTAIISSSLNDK

SEQ ID NO: 368060 - protein, 77 aa, Zea mays
  unsure (1)..(77): unsure at all Xaa locations
  Clone ID: MRT4577_98842C.1.pep
SHPPRHLXRRXARLLRRRAILLLLAPHQHLFRLLQVRLRHKLLPLLRLSPPPRPAVGRGYQPFNEGHQRSHGEAPTR

SEQ ID NO: 368061 - protein, 64 aa, Zea mays
  unsure (1)..(64): unsure at all Xaa locations
  Clone ID: MRT4577_98843C.1.pep
FFFFFFSAGQGASGRGGPPGSSPXPRVFPQPNPEPGYHLXKPGGARQIXAVLFGRKKGVATGGG

SEQ ID NO: 368062 - protein, 121 aa, Zea mays
  Clone ID: MRT4577_98844C.1.pep
FADRYAMVPRADAHARLQVSEARLPCIVLSARFSQSFSPLATQFNVVYRLLIRIIVYHNVRQSSLIYHAVHPHVAVRSCLIHGLRAKNMSARNIFWLNSPAGTGSCMSAWRFACVVFVAID

SEQ ID NO: 368063 - protein, 911 aa, Zea mays
  Clone ID: MRT4577_98845C.1.pep
MAVTFYSKINIRPGSVFRFGTISSVADEEGILHRIADPPEKKSPPTNPENAGKAQLPALRKKIASGRSGAEGPLNRRTPLSTSPTTEWTRIARKKKTGETQAVLSVPPTSRENGKKVAATATPFYPDILFIGRPPEEPPQRESRRRRNRRRNVRRHHVAGERDPEQPVSRDEVSEIGETPEERVFRERRNSRRRDRRRTQEQAEQDARQRRENPLFGRNLNPDFARAMNTPSEVGGVLARIADGLPRTPDAEGYRRLFTQAANHLLPLAHPPNDLRHAINSRRDARSSINASRERRHENEIRRREEYDRDHGFPTQSQATRTESATASTGGTTRGRSRNHRRHSPPRDKHRPRRQEDTCGVSALTPRLRAIQWPPNFKVSNVDKYEPKQDPGGWLAVYTTAARAAGASEDVMTAYLPIVLGQDALQWLRHLPRHCIDDWGDFSRRFTANFQSLSDKPAQPWDLKSIKRRGDETLRSYLKRFQTMRNRIPEVFVRAILQKAPTTSEELFREADLYITADERAQDLIGGAKPAPTAPRRDANQPPDKRWEKRPREEVHAAGPPASRARGGPRGGERTLDDILDAQCPYHKDMRHTLRNCRDFKHSVGHDRPFQPLPPPPPRGGPDEPRQPHQQEEGGGGAFPRVDREVNIIFGGHGSQENKRQQKLNDRQILVATTGPPAPYRWSEHPITFTREDQWLNFDHPGKYPLLVDPVIRESRVKKVLVDGGSNINVTFPRTLQGLGVHLKELHDSDTPFFGIVPTEGEYPLGHIYMPVTFGTPEKYRTEFLRFEVANFDCGYNAIIGRPGLAKFMAIPHYTYMILKMPGPQGIITVRADFQGAAECFRVAIQAALTTKPSTVPSTPANSKPKEDLVVPANEAQAATSMRPTEETKRINLGFADERKTAIISSSLNDK

SEQ ID NO: 368064 - protein, 261 aa, Zea mays
  unsure (1)..(261): unsure at all Xaa locations
  Clone ID: MRT4577_98846C.1.pep
MFPAGDHLLLFALASLGGAAAAGAGEGFCSAEPSNDCSQSPPLYSKVTSPTLAPVHLQDLPGFTRSVYKKDHALITPESHVFSPLPDWTNTLGAYLISPALGAHFTMYLANMQDGSKSALPPKDVERLIFVVQGSIALSVESGTTHSLLVDSYAYLPANMKHSVISDKPSTLVIFERRYTAVGDYHADLVVGSTDKQPLPXNPXEVFELRKLLPTSLPYDXNXHIMDFQPGEYLNVKEVHYNQHGLLLLEGQGIYRLGESW

SEQ ID NO: 368065 - protein, 118 aa, Zea mays
  Clone ID: MRT4577_98847C.1.pep
NKILRGNFPPTALKSELFDLIRDFKVLSPSEIKDFLKNVGVSCLLMILVQTTISASLKKKQPDPPPVLLLYKKNRPSCICRCSIQHRSIYILHCSTLLYMYVWPAVRVASIHLLVEAV

SEQ ID NO: 368066 - protein, 62 aa, Zea mays
  Clone ID: MRT4577_98848C.1.pep
ISSVAVSGHIEEAVASWQAQDFSCLQVRLSGGQFIARKACFPKCSGFLSGYSILVSYAAAKF

SEQ ID NO: 368067 - protein, 127 aa, Zea mays
  Clone ID: MRT4577_98849C.1.pep
FSLFFFFFFFFWGFFFFFCGDPNPPLIGPKKGPGPPQMGFPPIKTGKLSPQKHQTRPNSLSIGDLKPREGRIWFSKMGTQGGQTRARKPRRNLAFAKAGCRAHLVQLGKTKGALWGRPAGKKRLTGG

SEQ ID NO: 368068 - protein, 63 aa, Zea mays
  Clone ID: MRT4577_9884C.1.pep
MSPVLAAGMEPMAVDDSSYKKAKRKQLKAAVAVEEADAEAASVEKKEKNEKKRKVKEPSPPLP

SEQ ID NO: 368069 - protein, 30 aa, Zea mays
  Clone ID: MRT4577_98850C.1.pep
DEVVCQLVLTLVSEYLHYLSWKPRSGARST

SEQ ID NO: 368070 - protein, 95 aa, Zea mays
  Clone ID: MRT4577_98851C.1.pep
LAYFGSVPICLYIVQGLVMIVRCGDLPKTVASAESSLSLLGNQSRCVRARVMRVSMRSTGSMGPQSLGRVYGLWLPGWYHTQSWSSTVMFGRSNR

SEQ ID NO: 368071 - protein, 62 aa, Zea mays
  Clone ID: MRT4577_98852C.1.pep
WRTYVGGPKFSSPGYLQDAALHTLQKDLQEKMNKMRIVDSLDFIPATINSNICRPIISLWIH

SEQ ID NO: 368072 - protein, 192 aa, Zea mays
  Clone ID: MRT4577_98853C.1.pep
WRACTISPCPRPCLSPAHPHSSRNSRRRARRPSFLRWPLPRSPPLLPETAATPPSRADLAAASATLHPANRLVSSPLELCTPASDLVRDSRSPPASSGPSTAFGPSGYTCVQVLLVVKALSIQPHPNWELTGLHLRKRAQSCVRAGAIGGKSAIDPGAPEPGACRGGAEGPRIAIVHALRPTISSPGDEVVS

SEQ ID NO: 368073 - protein, 140 aa, Zea mays
  Clone ID: MRT4577_98854C.1.pep
FLFFSPWAPSPPSRFFSPRFLVLPPVFPLLFSLPRPPLWGGVSARLVAVPWPPPPLFCRPFSLPVLFLFFRRFPPSLFCPLICLPPCSGLCFFWRGTFCGVGCPSAATCSGWSSAFFSSLCSCWELNCILCGFHVGALNI

SEQ ID NO: 368074 - protein, 102 aa, Zea mays
  unsure (1)..(102): unsure at all Xaa locations
  Clone ID: MRT4577_98855C.1.pep
GMGGXPRGCWIARNLLXXMRVSIFQILQXGGEGPGEGGDPEVGGGAGRPQRPGSGRGGHGHGHGPGECGGPGLYGPALARSPPSRPPGSPTRPPTRPRTRGG

SEQ ID NO: 368075 - protein, 127 aa, Zea mays
  Clone ID: MRT4577_98856C.1.pep
GSSSKIKFYNFFFNQTCLNLIKKMNTFVPLIVLFAIVAMFSSGCFANPLDAPNPSFDIPNVPNMPKPDQFTEPLKDSFNRLKDNTQDYFNQQKGNFNPQGMLDMFRGWNAKFNPFYQNMFPFQMPSF

SEQ ID NO: 368076 - protein, 55 aa, Zea mays
  Clone ID: MRT4577_98857C.1.pep
PICLKDNPFWFIKNLWGENWGETGFSKICRGSNVCNKWGVDSMVFPVSPVPPSKE

SEQ ID NO: 368077 - protein, 42 aa, Zea mays
  unsure (1)..(42): unsure at all Xaa locations
  Clone ID: MRT4577_98858C.1.pep
MLQPRARYPPGYGSGGGGGRXRGGGGGNGGGGGNHIYYGRNP

SEQ ID NO: 368078 - protein, 87 aa, Zea mays
  Clone ID: MRT4577_98859C.1.pep
PVQDERIPGQGKRMFGFITFVYTETAKIMLSKGNPHFGCNARVLVKPYKEKGMAPDRFMKLQHPIHGDLAGWTVNTGLVDSRDHYDL

SEQ ID NO: 368079 - protein, 216 aa, Zea mays
  unsure (1)..(216): unsure at all Xaa locations
  Clone ID: MRT4577_9885C.1.pep
MLKNNGSATSGLLEIWSEELEGKSDFCNYRTKLLDLIKVIASQRSVIAAAIVVQRINVVFGDANQATKSPQDLDAMEGAQLGLEAVVNAIFDGSVDCGKTDLDTKSQLHKIFEGLLQQLLSLKWTEPNLAVIHGHYLDALXPFLKXHPDAVGSVVNKLFELLTSXPITFQDPSNNSRLARLQICSSFIRISRAADKALLPHMKDIADTMAYLSRRG

SEQ ID NO: 368080 - protein, 91 aa, Zea mays
  Clone ID: MRT4577_98860C.1.pep
SRIPGPTHASEKKSSYPVKCSLKFSSLVGYLQRYDCNLQFWRHHNGDRTLQLNLAANDRTLYPTLFDECSCCLSVLGSHYQIDSYQRGWSC

SEQ ID NO: 368081 - protein, 81 aa, Zea mays
  Clone ID: MRT4577_98861C.1.pep
NYLFSPPIKHSGKTSNPKGRLVEGVGGNGLGGPFNGVSSPGSNIGMTNFIEGRFTGCPWRPQSPTMANFLGILISPSSSTG

SEQ ID NO: 368082 - protein, 73 aa, Zea mays
  unsure (1)..(73): unsure at all Xaa locations
  Clone ID: MRT4577_98862C.1.pep
RPDYRAPHPTWNATLRFXAPSSFAGSLHVLLGAXRALFDRDVSEVHIPMSELLSGTLNSPEPRKFVAYKERKT

SEQ ID NO: 368083 - protein, 55 aa, Zea mays
  Clone ID: MRT4577_98863C.1.pep
VIVSRHGVLMRSAVGRFVLSRLCMQRSPFIGYSARSVAMSIVPWLSECHIRKEFI

SEQ ID NO: 368084 - protein, 97 aa, Zea mays
  Clone ID: MRT4577_98864C.1.pep
PTRTALYFVLDGIENRTTDLSDMLTSQESIAAPMTNLYLTYQDKGLVYHAKGFFSAPYVCWMHRVYGHYILYVLYVCLIQTQAIVINATYAHYLTMT

SEQ ID NO: 368085 - protein, 110 aa, Zea mays
  Clone ID: MRT4577_98865C.1.pep
GTPAGTVPKPRVDHRVRPRLRRDGRRACQCLWFLLLLLRHMAPVRHALCLFLGVTFLGTVIHGVQVGHHDREWLPLGDTRGLVSLKRKPSVEVQQFLVLQDWRMLLRDVV

SEQ ID NO: 368086 - protein, 79 aa, Zea mays
  unsure (1)..(79): unsure at all Xaa locations
  Clone ID: MRT4577_98866C.1.pep
SPPPXFLKXLXFXPXPSXFTLXPSLXPLSLLQIIITXXPSFTPXXLXFSLFXISFPXXXXXXSPPPTXFSTSNIPFXFS

SEQ ID NO: 368087 - protein, 92 aa, Zea mays
  Clone ID: MRT4577_98867C.1.pep
DDEGVLDKCRAIDGLGGDDPLRAYGITDMRCGAYPRLLLRGLNLAPPPETLTMGKIFEQCTPIWGDINHASESPLHEIKPLGARASQRSDEW

SEQ ID NO: 368088 - protein, 99 aa, Zea mays
  Clone ID: MRT4577_98868C.1.pep
FWYQGSSAQIRHSSPVIPVLSLCSAYSGQHVMARPPIMPSCVQLQQQCLGIARRSCSRQVTACGPLSFSVSALVLCSCLVSGLYPAVPGWCMVQESVCS

SEQ ID NO: 368089 - protein, 59 aa, Zea mays
  Clone ID: MRT4577_98869C.1.pep
WMVLLGWCCRAKSQRQVGLCTHVLKRDLQGLLTSHSILSHSLNKALFNDMSKTAPWTLY

SEQ ID NO: 368090 - protein, 138 aa, Zea mays
  Clone ID: MRT4577_9886C.1.pep
GTLGPAGASAPCIRTPRKLAPTPPWPAHVARSSSPLQFNCIAVLESRSPPSYALPCPEKATPVILPHRVRRKIAIRFRASRNRRSNIGDQVSKLFKSYKVEDSEHLFGEGCLWCNLCSGKEGVEANLQEFQDFNESGD

SEQ ID NO: 368091 - protein, 121 aa, Zea mays
  Clone ID: MRT4577_98870C.1.pep
QDGMGGLQVRLGNNGQSGGCWVDIAPRPGALMVNIGDLLQLVTNDRFRSVEHRVPANKSSDTARVSVASFFNTDVRRSERMYGPIPDPSKPPLYRSVRARDFIAKFNTIGLDGRALDHFRL

SEQ ID NO: 368092 - protein, 74 aa, Zea mays
  Clone ID: MRT4577_98871C.1.pep
TAPIHEVAEKLIHRMRDKNRPVIALHLRFEPDMLAFCECCHRGGENERRELSAILRRWRTLHIRDPEKGRLPGR

SEQ ID NO: 368093 - protein, 56 aa, Zea mays
  Clone ID: MRT4577_98872C.1.pep
IQCIATPSSDALIGLIRPDKLKPGDLVGRNKDRYLLLHTLPSQYDSRVQAMQVYEK

SEQ ID NO: 368094 - protein, 48 aa, Zea mays
  Clone ID: MRT4577_98873C.1.pep
RERNKWRGKTPKKDRVFLVLLDYCWAIHVSNSIASKIKKTSRLHDVPR

SEQ ID NO: 368095 - protein, 55 aa, Zea mays
  unsure (1)..(55): unsure at all Xaa locations
  Clone ID: MRT4577_98874C.1.pep
GASGAGTRSSGEIDQVVEADPDTEAEDQEERWARLLPELLFDLVRRVXAFRGERW

SEQ ID NO: 368096 - protein, 96 aa, Zea mays
  Clone ID: MRT4577_98875C.1.pep
PFCDYCTIRTRIYRSASARQLAAAGLMPLPPRLHEMYPSSVDRKHLLECSRTQSTLSCAIVGLLSSHRTKPEPIVHIDLMTGIISHHMYYVCTKGD

SEQ ID NO: 368097 - protein, 200 aa, Zea mays
  unsure (1)..(200): unsure at all Xaa locations
  Clone ID: MRT4577_98876C.1.pep
MATLEDLGVSAFINILGAFVFLLLFAVLRIQPVNDRVYFPKLYLAHKRHQHDHAARSAFRRFVNLNLCTYVTFLSWVPGALRMSEPDLVAHAGLDSAVYLRIYTLGLKIFLPITTLALLVLIPVNVSGGTLLDLRKEVVFSDIDKLSISNVSPGSNRFFIHLLMAYVFTFWVCFMLYKEYSNVAFMRLHFLASQXRCADH

SEQ ID NO: 368098 - protein, 69 aa, Zea mays
  unsure (1)..(69): unsure at all Xaa locations
  Clone ID: MRT4577_98877C.1.pep
IFGLMKGKKKPPKGFFNWEXQFLKKKTPPPXKKKPGKMWVXLKKGAXGTPERGGGGVGKLRVFNYPLKI

SEQ ID NO: 368099 - protein, 128 aa, Zea mays
  unsure (1)..(128): unsure at all Xaa locations
  Clone ID: MRT4577_98878C.1.pep
PRVRPRVRVKTLVEAAADSCPKAFIHMISNPVNSTVPIVSEGLKQNGVYNPKKLCWVTTLDAVTANTFAAHKKNLKLIDADVPLVAGHCXITILTLLWKTXPSVTCTDEETDELTKRIHIAWTEVADA

SEQ ID NO: 368100 - protein, 388 aa, Zea mays
  unsure (1)..(388): unsure at all Xaa locations
  Clone ID: MRT4577_98879C.1.pep
MSLYELRHAMSESDGDVAMEKVLGMDWSRKPGDPVDPAVDAEWIAGIARLGLDTNFVVVHGAGSFGHFQASRSGVHKGGLHSTLVKAGFVATRISVTSLNQEIVRALAREGIPSVGMSPFACGWSTQQRKLASANASQIFQSLHAGFVPVLHGDAVLDELLDCTILSGDVIIRHLAQLLSPKYVVFLXCYLPSFTALKVLCYRWKMVLYTIWFSKNCDXTDVHGVYDRPPTDSNAVLLREIXSIHLVDFYLPIISILYLLMCISHYARKQDNKGNAIVIIQFLGKTWKYASSTNXLTCVSXEVDAIGGWSIVKPALLQGNPKGVEISVAAHDTTGGMETKILEAAVIARLGIDVYINKAGTEPSLRALKGDVSPDSEDWLGTIIRSSK

SEQ ID NO: 368101 - protein, 72 aa, Zea mays
  Clone ID: MRT4577_9887C.1.pep
VSRLRHSDCSALCRFPSISWNMRTMTQSVWLLRTCTPSVCVPLHGVAFLTVSPGRAGGRLMSSKWSPGLVPN

SEQ ID NO: 368102 - protein, 163 aa, Zea mays
  unsure (1)..(163): unsure at all Xaa locations
  Clone ID: MRT4577_98880C.1.pep
KGRAPSSHDTTXTTTNAGAXXXNDNEAXTGGXRXPNPXEDYHRGEKXAHXARERXPERXXHARGAPAKGFXEXTHDXTXXTXADXRRAPGXRTPENXRHTTENHERGTPETSRDPRGGAGKXNTREGNGDRRGNKQPGENNREPXKEPDGNHADKPNPRAHXQ

SEQ ID NO: 368103 - protein, 40 aa, Zea mays
  Clone ID: MRT4577_98881C.1.pep
FGPKKNFLDHNGLRVHFIRDVQRKYFFGTLTRPDSHFRVG

SEQ ID NO: 368104 - protein, 59 aa, Zea mays
  unsure (1)..(59): unsure at all Xaa locations
  Clone ID: MRT4577_98882C.1.pep
XFFFFFFFFFLWFFEHNTRVTTLKKRPSNETVNRDATSTLRPKHTHWGGNINKPLYNYH

SEQ ID NO: 368105 - protein, 75 aa, Zea mays
  Clone ID: MRT4577_98883C.1.pep
KFVRCLYDGAMKKNVFKKESYMGVFTSILKQIPPCLRVVAHSGYAARKALCLDLIHKRSLGAGKRTYLGWWIPLG

SEQ ID NO: 368106 - protein, 112 aa, Zea mays
  Clone ID: MRT4577_98884C.1.pep
MRPQVVLLVSLAVFVVLVALPLGKANEEKEAAAEGVDARRWRWPCCDECGVCTRSQPPICQCLDTSTSGCNPGCKACVKSISDGLYECKDRIVNFCKRRCTRPAAAAAAADA

SEQ ID NO: 368107 - protein, 104 aa, Zea mays
  Clone ID: MRT4577_98885C.1.pep
RYYTHAARRKLGIRLERTPPVTFFAEGQGRTLGGFEKTIARFHARLHLTMIAATYNLSQLVTCAIPWLLRAMEFNGDPSRSDDEKKTLIFKGNPNERDGLLTAR

SEQ ID NO: 368108 - protein, 74 aa, Zea mays
  unsure (1)..(74): unsure at all Xaa locations
  Clone ID: MRT4577_98886C.1.pep
LSSILPPFFFLLLKIGQNIYKKCRVFPLFTYIPPPXNQPFNHSFFTSIIPFHFFFHVPHDPQSLPIHPLSLFPA

SEQ ID NO: 368109 - protein, 94 aa, Zea mays
  Clone ID: MRT4577_98887C.1.pep
GSPPPEARQKKVSLSPSPKTPMFGAQRKRRFLPKTSNWKTSNSKAAAAPGTNSNLFLFKEGPPPPVNGPPHFNPRNPKTTLSPFYFLNIHMPPV

SEQ ID NO: 368110 - protein, 113 aa, Zea mays
  Clone ID: MRT4577_98888C.1.pep
VPRGRPGPHHVSYTPPPAVLSCALTPRTPPTTPIPNPPFLTPLSLARRDSFNAKATAMLIWTLPVLFRFHPTDEEIEDALPAREQDHRVTINSDDEVIPRDRHTETIDMAPRK

SEQ ID NO: 368111 - protein, 89 aa, Zea mays
  Clone ID: MRT4577_98889C.1.pep
MIQTDHFLVVQEKETMSREEYALQGLMLHGDKLCCNHGQEMLSVLDKLSSYIKLILLHIRSLWSWVSIYHLIHQFGCNGIRASVRPQLG

SEQ ID NO: 368112 - protein, 80 aa, Zea mays
  Clone ID: MRT4577_9888C.1.pep
KLGIRLEHKLGKSEKTVWEKNDEPGDEVDVQQNGWGTWKQNSTSAWSYRALRSSALGPTMALLRGKNNQRGKPPYRKKGK

SEQ ID NO: 368113 - protein, 139 aa, Zea mays
  unsure (1)..(139): unsure at all Xaa locations
  Clone ID: MRT4577_98890C.1.pep
MVQLPDDMLVEMVSRLPRSSLXASRCVSKHLCSIVDARRLLRTGHLLPLRLDAFYCISLASVDRETYLFARPSVARRIPGACLDFRVDLEVVDHCNGLLLLCDMVFRLLNPATRQSAALPKAPDPSIENMLGVATVWAG

SEQ ID NO: 368114 - protein, 225 aa, Zea mays
  Clone ID: MRT4577_98891C.1.pep
DSNDELADKSELWRPLNCLVEAANRTKSFRSSSQSPVVKGEQPNGSTSSTFASKAKARENLEKSKIQDDKKDVPMPPVLPKRRAQGTARKKRDRLQAPTDVKPDAAVAQNAKKFSSIWFSLIASFDQQGDPPLPQIPSHYLRIKDGNIPASSILKYLMQKLSLPSESEVEIKCCEQPVNPSQPLRNLVELWLKGRATQTTQTMTGSSAKEFVMVLTYGRPKAPAM

SEQ ID NO: 368115 - protein, 70 aa, Zea mays
  Clone ID: MRT4577_98892C.1.pep
MRLSHGSTVIIPAESGAAAVHVVQQHTPAQVSRTPSRAAPTTLSAARELLRHPLAVGSRTPARGGVNRRF

SEQ ID NO: 368116 - protein, 89 aa, Zea mays
  Clone ID: MRT4577_98893C.1.pep
GQFRGLCGTSGGHVWGRPPFLLHYLLSVMSAYVFCVSFVFFYVFFYFVFFFFVCFFLFFLFFFFWHQNYSNIYHQQYTMQANRYTLFLS

SEQ ID NO: 368117 - protein, 299 aa, Zea mays; identical to SEQ ID NO: 262286
  Clone ID: MRT4577_98894C.1.pep

SEQ ID NO: 368118 - protein, 175 aa, Zea mays
  Clone ID: MRT4577_98895C.1.pep
MVQFGNMSSKKIELDHKDMVHDSAIDYYGKRLATASSDSTVKIINIGAANAPSQVLATLSGHYGPVWRVAWAHPKYGAILASCSYDGRVIIWKEDARGNWSQVHVFSDNKSSVNSIAWAPYEVGLCLACASSGGRISILTMRADGGWDTATIERAHPVGATAISWAPATDSIAGT

SEQ ID NO: 368119 - protein, 92 aa, Zea mays
  Clone ID: MRT4577_98896C.1.pep
PPMKTGLPKISKMKCCIGIPLKYSTSYSPMPGKKPLVAASSNVCEIKLLSNLLPPPCHGNSVILALFTPGAAVFALAVGIISGTVGTVSPHL

SEQ ID NO: 368120 - protein, 163 aa, Zea mays
  Clone ID: MRT4577_98897C.1.pep
PAPLFLCMSPRSSAVVVIHPRRLLLATSAPRRPPCRCWPLPGLLSPTPAPRPGRLSVLIWSLSPRQRWGRSLRARIWRGAGRCIRPCCHPVAGGWLNPSTQPAHQAGVRRRPDGLRRASFQRKAATSDSGSGSGGGATRRSSSSTARRKKAKVVAGLLELSLA

SEQ ID NO: 368121 - protein, 34 aa, Zea mays
  unsure (1)..(34): unsure at all Xaa locations
  Clone ID: MRT4577_98898C.1.pep
VLRPTTLGYLRRTNELGRXAYLPLPYTXPTVSSL

SEQ ID NO: 368122 - protein, 87 aa, Zea mays
  unsure (1)..(87): unsure at all Xaa locations
  Clone ID: MRT4577_98899C.1.pep
EAMAIKIRGRTVRKEYLARVVGHFPDGEVVCDQPILQISPKLGLNXVRANGKSARTVFKRLAYYPSRDGDAEEPAVLAEDGKPLTPA

SEQ ID NO: 368123 - protein, 62 aa, Zea mays
  Clone ID: MRT4577_9889C.1.pep
STRLPLPLQLLKHLRQGTLFQNITQPLYAKIQAINLRLCSQTGRNHVRALAHKRHVPLTHPD

SEQ ID NO: 368124 - protein, 263 aa, Zea mays
  unsure (1)..(263): unsure at all Xaa locations
  Clone ID: MRT4577_988C.1.pep
MATSKLITMTMTILLFLIVGFIPELCVAASSDHEQFVFTGFTGSNLSLDGAARITSTGLIELTNDSARIKGHAFHPSPLRFRRSSDGTVQSFSVSFVFGILSSFGDIRGHGFAFFVSPSKDFTAAYPIQFLGLFNSTNNGSLSNRIFAVELDTIQNTEFGGINDNHVGIDINSLNSLKSYTAGFYNDQNSGRFTNLPLIGSQQPIQAWVEYDGNKTRIDVTIAPLGLAXPLTPLLSLAFNLSTVLTEEESYIGFSSSTGLSTH

SEQ ID NO: 368125 - protein, 143 aa, Zea mays
  Clone ID: MRT4577_98900C.1.pep
PLERASRGSSGNGPPPPTHPGGHVKVCFFNLWTPFPLGNFCCKKVGPFPGSCSPMSVGPLLPRGASPPVSCPGCFPPPQTWPFPLLGAPFFGGFFFWKLVFYIPRFLKGPFFPPWPFAPPSILAPPPLVAALAGGPFPLGGFP

SEQ ID NO: 368126 - protein, 165 aa, Zea mays
  unsure (1)..(165): unsure at all Xaa locations
  Clone ID: MRT4577_98901C.1.pep
SFLHCVFEQSLQHLRSASSKKSVNIELARVRSTARVSREGDEAEAAETTPISEVMKQSGLVVLEEAVAEGSSIAEAEXSXEGGSDNEDEEDYTILSPAKPSHLEFGKSTVTADDMVMMKKLGNFSEAESKLIRFAGEEVIPEPKEDEVVVFKSFFRAGLQFPLYD

SEQ ID NO: 368127 - protein, 101 aa, Zea mays
  Clone ID: MRT4577_98902C.1.pep
YRLTYRSLSGRRVWIVAEQPLHDIQTHRLQLVNDDRRQHNQTHTVGGVQNDYKRLHCAHWGHYEHPHALRTMTTLIDCVTDFALAHWAPLRYGQHPYHLRA

SEQ ID NO: 368128 - protein, 81 aa, Zea mays
  unsure (1)..(81): unsure at all Xaa locations
  Clone ID: MRT4577_98903C.1.pep
GLARPGWCLENASNXGPGVAPICSSGCYNPTLLRPRRYACWCRSIIPGSSSASRLITDDLKQFHNVWTSTEIKILQNXCGG

SEQ ID NO: 368129 - protein, 119 aa, Zea mays
  unsure (1)..(119): unsure at all Xaa locations
  Clone ID: MRT4577_98904C.1.pep
NWTLMXMLKEMDQNGELLLGNVPFPCDFPGFGRRVLVVSFVPAPISGVRSWFFEGPRVVVAPSSMKHPRSSFIPAVRTFSKRRPSPMGSRQLTNGSANFPHVTPRRAKCDERMSSVVMT

SEQ ID NO: 368130 - protein, 50 aa, Zea mays
  Clone ID: MRT4577_98905C.1.pep
MTDGILGKAATMEIPIHGNGEAGQLPEDDGLEQDLQQVMVSGPNLNGTSI

SEQ ID NO: 368131 - protein, 73 aa, Zea mays
  Clone ID: MRT4577_98906C.1.pep
MLLHIASFIKAHVFSRRRPIDGWKDMIEEIGPNARKGKGSGPRLPRVSAPATQPYREETPAVASSSLLTGNPT

SEQ ID NO: 368132 - protein, 79 aa, Zea mays
  unsure (1)..(79): unsure at all Xaa locations
  Clone ID: MRT4577_98907C.1.pep
EEMVQVALLCTQYLPGHRPKMSEVVRMLEGDGLAERXEASHRENTTKCKPQESSSSDRYSDLTDDSLLLVQAMELSGPR

SEQ ID NO: 368133 - protein, 117 aa, Zea mays
  Clone ID: MRT4577_98908C.1.pep
TCQRSAALPRPGPCYRGATCLALRCRCSGVVIAQVLSALNSLPFCSPAVDSLLVSLLCHHSLSPSSTSTSPLLVSSKPSRLAGFLYAASRVPLASFTCRVVEQVVYPMSLGQSNGSC

SEQ ID NO: 368134 - protein, 214 aa, Zea mays
  Clone ID: MRT4577_98909C.1.pep
MSREDNVYMAKLAEQAERYEEMVEYMEKVAKTVDVEELTVEERNLLSVAYKNVIGARRASWRIISSIEHKEESQSKVFYLKMKGDYHRYLAEFKTGAERKEAAESTMIAYKAAQDIALAELASTHPIRLGLALNFSVFYYEILNSPDKACNLARQAFDEAISQLDTLGEDSYKDSTLIMQLLRDNLTLWTADSTTEDSIEEGNEASKGDAGEGQ

SEQ ID NO: 368135 - protein, 55 aa, Zea mays
  Clone ID: MRT4577_9890C.1.pep
SGSMFSMLVFTNRTRWLGGRSNPVYKYAKSPIYDRASECLRDWVFHEHQIICVDS

SEQ ID NO: 368136 - protein, 109 aa, Zea mays
  Clone ID: MRT4577_98910C.1.pep
TQLKIHCECCHGPHTLFYLSIYNTYRRRLAPKHKKKHQNQKTKKNKKKEYGKPAGNHRRASKVLSQLDNQTNNQASLMKMNKTDIHPPPTDLARQQLQHEPHHEQYTQS

SEQ ID NO: 368137 - protein, 61 aa, Zea mays
  Clone ID: MRT4577_98911C.1.pep
STSTCGGEDNVYMAKLAEQAERYEEMVEYMEKVAKTVDVEELTVEERNLLYVVYKNVMGGA

SEQ ID NO: 368138 - protein, 102 aa, Zea mays
  Clone ID: MRT4577_98912C.1.pep
TINHNHYILQNKPKHTLRGEVVALCLLSLGSSSNCKHTTCKWGLQPPPTVHLPSTVHVPSAIYLSPAMHLASPIHLPPAVHLPPAIHVPSAGYLSSAPCHYP

SEQ ID NO: 368139 - protein, 68 aa, Zea mays
  Clone ID: MRT4577_98914C.1.pep
TKRDFWAFTHKKSKRRGPPKGGAGGNPLLLLKQRGGNGQHCLTNKRGPYLRPIIGGDLYNYGYEKKGN

SEQ ID NO: 368140 - protein, 65 aa, Zea mays
  Clone ID: MRT4577_98916C.1.pep
RRARDRAREAGGREADRLVSTPTTSLQHLASQHSPSSPMNGSKEFSHLSFILTRPPATHSSICVR

SEQ ID NO: 368141 - protein, 548 aa, Zea mays
  Clone ID: MRT4577_98917C.1.pep
MAETGESSPNPAAAPEDTHHEGSEVPAAAVAAVHAQPQLQPQPRPPPQPSKVRLMVSYGGRIQPRPHDNQLAYVNGETKILSLERPVLFADFAARLTTLVGNARDVCVKYQLPGEDLDALISVTNDEDLEHLVVEYDRAHNNGPAAGSGSGRGGATPRLRVFLFPVQPPPPPPPAGLLEPKADQRLYIVEALNTVSLPSSKLDPPPVPSHQSSPPQQQKRESVFAQQSSSPPPPPPQAKHEAVFVQQAPPQPLTAFQMPPPPQPSHVVLTAAGPDYLFGLDNGFVPPPAVKVKDPAGDPPTVRENVPVEIPAKNDDRHPNPAGDHVAVSPVVSPAEYQRQIQELEKLQVADNATHQPPPPATAPAPTHGPVPAALPRNGSDDSLARAYPPVTATPTSNAEYYIPKFPEKPPVPPLSSAPPPTTYVQVQGRYASVAPGSGADHAPVFFIPAPHGYFAAAASPGATSYPAVYAVAPPSATANGSAPSAAVSNATAYAPAPTQVAYDSNGRAIYYTSMLPQYPSAVNGMSAPGGVLGTEPAKQVAVKPTVS

SEQ ID NO: 368142 - protein, 132 aa, Zea mays
  Clone ID: MRT4577_98918C.1.pep
IHPHANPYMAMRPGHSTSSRIDSVVEKHNSSTADANDNNKRVLPSSFSNGNTSKSMHPIVASETRKLPLPLSTKKSPNIGENRMGTNIANGNLQPSSSIMARGSSSTLNTHKADDDDDIIVYGGSSSHRVLP

SEQ ID NO: 368143 - protein, 98 aa, Zea mays
  unsure (1)..(98): unsure at all Xaa locations
  Clone ID: MRT4577_98919C.1.pep
MQFLVCSCLSHLQNLREKMFKPMLLPFQMEIQAMIKAVSKAPVSGALLPXXCGLFLPPXXSVSVXCFVCCLSVAPGLCWCVFCIRPPLGWGGGGKXNL

SEQ ID NO: 368144 - protein, 94 aa, Zea mays
  Clone ID: MRT4577_9891C.1.pep
MQEACNRTTVVHHFGFIASGTGKGDISKGILLREGSGPRALLLIRGSKAGPSEGFDSRPRALGLQALLLIRGSKVGPSEGFDSRPRALGLRAHY

SEQ ID NO: 368145 - protein, 62 aa, Zea mays
  Clone ID: MRT4577_98920C.1.pep
ARRRRGRRPPAAPTAPSFSPQSIGWTASVSSARERTTPARQGDSREWQLAATRPVPKSCRPG

SEQ ID NO: 368146 - protein, 492 aa, Zea mays
  Clone ID: MRT4577_98921C.1.pep
MSSPNNSVSAALSGTTPVFQLRVWQLIAIAVGIVMAILLVIALCLSLRRKKKTVKGFDNSSLAEIPIVSKEINVDRVGAQSLHDSEAPFMPVQDKYSQTKGAGQLGGRRSVDVDAFSQCSSVYNIEKAGSSYSEDYSYSSSGPARKGSSPYAYSASPLVGLPELSHLGWGHWFTLRDLECATNRFAKSNVLGEGGYGVVYKGRLVNGTEIAVKKILNNVGQAEKEFRVEVEAIGHVRHKNLVRLLGYCVEGIHRMLVYEYVNNGNLEQWLHGVNQHGVLSWENRMKILLGTAKALAYLHEAIDPKVVHRDIKSSNILIDDEFNSKVSDFGLAKLLNSDKSHINTRVMGTYGYVAPEYANSGMLNEKSDIYSFGVVLLECVTARDPVDYSKPADEVNLIEWLKMMVTSKRAEEVVDPNLDVKPPKRALKRAILVGFKCVDPDADKRPKMSHVVQMLESVQNAYHQDQRKLSQVGSIDIESQQSLEETSNSADA

SEQ ID NO: 368147 - protein, 320 aa, Zea mays
  unsure (1)..(320): unsure at all Xaa locations
  Clone ID: MRT4577_98922C.1.pep
MALRALDNTKPAAVEERPKKVAKVGXRRRRQGRRLPREWRQEEEGXNDENSAPRATAAAAEQAVEYISSEELEAAASPKAKAAGLVADLDSKDWVRTCEALNDARRLAIHHPALLNPILEKVVLAVVKTMKSPRSAVLKTSIMACADIFSSFGNLLASVSDDAFDKLLLQLLLKASQDKRFVCEEAEKATRAMAASMPPLPLLKKLKAYVHHANLRVRAKAAVAISHCAARMDIGAMKEFGMSALLQLAAELLNDRLPEAREAARGVVASTHAAFVKEAAASGQEDDAAASWESLCALSLPPISAQAVAKIAAAAAASSQ

SEQ ID NO: 368148 - protein, 66 aa, Zea mays
  Clone ID: MRT4577_98923C.1.pep
KDKLYTTDQVSAQHIATANNKNECRRAKNRSQSSAQHNILDGKKCSVLYTTLSCGRTPINSTCDTQ

SEQ ID NO: 368149 - protein, 48 aa, Zea mays
  Clone ID: MRT4577_98924C.1.pep
GTFLAIMETGSNRLPLISCKIGFWSIHSLRHKTHVWFCLGNEVTQPPF

SEQ ID NO: 368150 - protein, 36 aa, Zea mays
  Clone ID: MRT4577_98925C.1.pep
SDLYHHRPCVNSLALLSKHLRKKLASSNNLFTEEPA

SEQ ID NO: 368151 - protein, 55 aa, Zea mays
  Clone ID: MRT4577_98926C.1.pep
RSARGAASVHSTALPTTRTARRNRDADIFFWGGMLVYLAMELVCLVCVLLVCRRL

SEQ ID NO: 368152 - protein, 64 aa, Zea mays
  Clone ID: MRT4577_98927C.1.pep
RKALSFYFIQREPPPPQLGFTCKRFVPTYKQCQSCDALPRGPLVTGPKGDNDDRHLTFVAPSCF

SEQ ID NO: 368153 - protein, 272 aa, Zea mays
  Clone ID: MRT4577_98928C.1.pep
FGTRRETQLSSVSAALDHQTWASATATATAPKASEEAVSCEGSPEYRLPFSKPHVPSPPQVSDPTNYAMTGKILLAAAGAFAGVLLALVALHLYNSTRRRRLGGNQRRLFRSLAIAGGDEDRRDGDGEGAPPPHRGLDSAVLAAIPVVLIEAGADAGGGDCAVCLAELEPGEKARALPRCGHRFHIECIGAWFRGNATCPLCRADVVVVAPGAIVPAEGGALSEEVRIDVAGDAVAATPNGSTVVPVMGRLHSGRDLEKARRVFASTRFSSF

SEQ ID NO: 368154 - protein, 67 aa, Zea mays
  Clone ID: MRT4577_98929C.1.pep
GSMLCSFLLELLFFFIICIVMTLQHKRMEQQRTGYQKQNLILLPRGGGKRTRGALALIEAGVWRYLL

SEQ ID NO: 368155 - protein, 134 aa, Zea mays
  Clone ID: MRT4577_9892C.1.pep
PIINCKPKPDGDSRTDEFAARGRPTRVQTGRKSPREAGSATPLKKLAVPVRAPVRRQAGGTRGHRPAGRLHGRSHQPLPDRAKTHRAPRQVIGWSIWQMPTSSPLRLFLLASCLVLLRFVSALFCPRPGPAGLE

SEQ ID NO: 368156 - protein, 78 aa, Zea mays
  Clone ID: MRT4577_98930C.1.pep
PTRNSHCRPNPRVSSPPLQHQLRRALTVRQAGSVRLDRNALFSDGYYLPGRSVTHTLPLLKCSHTRGLQGYHCLSYFS

SEQ ID NO: 368157 - protein, 115 aa, Zea mays
  Clone ID: MRT4577_98931C.1.pep
MRVGRRCRWASASHASCLRARACIERDLQYGIVPYRLPCYRYTVHLPGSPIARWPVGIFWLARTLQCHGLASPFTRSWACIIGMHSSFFRYSNMVKFSQKTQEGGRRLENSSSRQ

SEQ ID NO: 368158 - protein, 94 aa, Zea mays
  Clone ID: MRT4577_98932C.1.pep
PVAHASGFLGGSLFLSPPRHPPGVGDAGQVVDTAPFCTLQQEQILDTHSLSHLMLKLCGLKVSCKDNMEGMPIWCTDRFLVERGALCPCRSLCA

SEQ ID NO: 368159 - protein, 102 aa, Zea mays
  unsure (1)..(102): unsure at all Xaa locations
  Clone ID: MRT4577_98933C.1.pep
GHPLFKLINHSFIDLPAPXNISIMXNFGSLLGVSLXVQILTGLFLAIHYTSDTITAFSSVTHICRDVNYGXLIRYLRANGPSIFXICXILHVGRGXXXXGSX

SEQ ID NO: 368160 - protein, 64 aa, Zea mays
  Clone ID: MRT4577_98934C.1.pep
HYSCEQPPIKLSIHHLHRINLLLIYLILFLTVSDYNSILYTNYKHRAMTITNSSILYSQIIITL

SEQ ID NO: 368161 - protein, 93 aa, Zea mays
  unsure (1)..(93): unsure at all Xaa locations
  Clone ID: MRT4577_98935C.1.pep
PRRSAAAGRRTXSGATTCTWRGTSTTWAPGSGRTAAANSTAATPSSTNTSTALAPTPTPXPAATILVGGATXGGASSTXTNNISSHRATNXND

SEQ ID NO: 368162 - protein, 75 aa, Zea mays
  unsure (1)..(75): unsure at all Xaa locations
  Clone ID: MRT4577_98936C.1.pep
YDYLDKNRLIDDCLVSETNMAPRWTRNEXXLEFKYSIGLKIATQTLQMQRXTIQGQIWDSAEQERYSAIPSSYYR

SEQ ID NO: 368163 - protein, 95 aa, Zea mays
  Clone ID: MRT4577_98937C.1.pep
SSTHADCALVLPPSDRAIQLTSEDLQDHRRRSQQRWARAGAGAGAALPGSLHAPPFFSLSFPSCINGSSAHIHGHPHISSILPPLPFYPDAPTTA

SEQ ID NO: 368164 - protein, 43 aa, Zea mays
  Clone ID: MRT4577_98938C.1.pep
SRFVIYEISDDSSIILMMTNINEYKFLVEYWYTVSSFVIPPYK

SEQ ID NO: 368165 - protein, 148 aa, Zea mays
  unsure (1)..(148): unsure at all Xaa locations
  Clone ID: MRT4577_98939C.1.pep
MIIALTRRLTLVSTLTALGPPXTTTPAPHTAPLATPLXTXTHTVPTPLVLTTLASRTRTILVSTLTDMALPVTTPAPPTALLASPALDTPPAXXVTPXAQTPLVLTTLTWLTSXTLVLTLTDMALLATTPAPPTVPPTALPASLVLVT

SEQ ID NO: 368166 - protein, 299 aa, Zea mays
  unsure (1)..(299): unsure at all Xaa locations
  Clone ID: MRT4577_9893C.1.pep
MTLEKVRVSIATNPHILLIDSAHTFTLNGKAVVRVEAPSSMKNHAPIDLVTLININQSMSWPAASQTEIPSRLDLLKNAMKFIIRQLGDDDRLAIVAFNDXSSKRIPLAXEISGSGRMAIEKKVDGLVAMGDTAFKPSLEHAVKLLDDRDDKKRAGFIVLISDGLDGQSKWGDEXHPHGSYPRPPPKVXVHTFGLGKAHDPKALHYIADISYGIYSSIVTDNLDKIIEAFAVCLAGFKTVVAVDACVDIWSNSLLITRIDPGGYILRGSSGGILVGTLYAGEVKDFIVYFSYRTGSWSS

SEQ ID NO: 368167 - protein, 204 aa, Zea mays
  unsure (1)..(204): unsure at all Xaa locations
  Clone ID: MRT4577_98940C.1.pep
MFLQRSAMAAARRAAPRALAQRTFTTSFVRRDDSKIAQKETGHSANSPSVLEGFKKLDEIKSEADLLPPGAKPGTVPTDAEQSTGLERLEILGKMQGIDIFDMRPLDASRVGTMENPITVNSAGDEQYVGCTGCPADSHNVLWITLTREEPKSRCMECGSVYEMHYVXPAEDAHGHHDHHDHHEKPYPRAKTMGDFPQPEYREL

SEQ ID NO: 368168 - protein, 62 aa, Zea mays
  unsure (1)..(62): unsure at all Xaa locations
  Clone ID: MRT4577_98941C.1.pep
PXGMHSFCQNSNCCKIGSAFQKKTFLWFPILLLLLNLLLPSNFLDPLLHFPLCLVFFCALLP

SEQ ID NO: 368169 - protein, 233 aa, Zea mays
  unsure (1)..(233): unsure at all Xaa locations
  Clone ID: MRT4577_98942C.1.pep
MAPGRSLRPAGTAAVLWAASLLLLATSCARAGGAYAGPGCRKHVARVTEYGAVGDGRTLNTAAFARAVADLARRAPDGGAALVVPPGKWLTGPFNLTSCFTLYLDEGAEILASQDMKHWPLIAPLPSYGRGRDEPGPRYSNFIGGSNLTDVIITGKNGTINGQGQVWWDKFHAKELKFTRGHLLELLYSDNIIISNVTFVDAPYWDLHPTYCTFFTISHVRGLARXESPNTDG

SEQ ID NO: 368170 - protein, 303 aa, Zea mays
  Clone ID: MRT4577_98943C.1.pep
MSALEEVKALLLMSKTALINKRARRRRFRWKKQKRATAPRSRRWRMPWNRTVITISRRSLRMWATTLLILISPAARTPKETVACSRAQGRVLASTNKKTPSATARKPLQLTNRGNQDDAKSSAGKAATVPSGPVFRCTERAEKRREFYMKLEEKHQAMEEEKIQLEAKLKKEQEEALKQLRKSLTFKANPMPSFYHEATPSPKAEFKKLPTTRPKSPKLGRRKTASTSMETSNSSSESEGTRPCCRASRDGLDSSCRCGGRSRPQAANAKPAAGPKKPPPQQQQPKHRAHKIAGEGAINIAVH

SEQ ID NO: 368171 - protein, 48 aa, Zea mays
  Clone ID: MRT4577_98944C.1.pep
YNMKNPYYCICHGYISSSDACPIIFYHLNVSVMGILLEMQHLKSFRQE

SEQ ID NO: 368172 - protein, 226 aa, Zea mays
  Clone ID: MRT4577_98945C.1.pep
SQHPPCALEHATVSFGVLAAGLIRIRSVVAHILRLRREIVMTVRFQGILHRRDRGAVARFCFFHRNRRLLALLFISAVFDINRRAFTSSSALITSLLGTFGPRIPFVSSSSLYYSRSQVFGAAIVVSLSINNSARQVRVRRISTLLVGHIHGIANDRIKVLFAKEQGRPTGEAVTTEETGCSDPTCFRAGAGRPAVSSAATRGCWCCWWWLGFGRGRRLRRPRPAS

SEQ ID NO: 368173 - protein, 87 aa, Zea mays
  Clone ID: MRT4577_98946C.1.pep
WGPWVFSLPVCFLVVFYCGVLKWFLHFCLRVALFFCPPLNFVERVPPQKVKEEALNPTQFFYVKKKKKKKKKKKKEEGGGGGGGWRA

SEQ ID NO: 368174 - protein, 168 aa, Zea mays
  Clone ID: MRT4577_98947C.1.pep
MVLSPSPPLPTAASEPKQQQRGGTNAAPEKSDKKYAHVPTPLHHGHRGASKKAPRGGKGGDVADPAAYVAAVSCSDCRFKQRALAPASPGAVIRSLFVSLTRRSTPRSSPSATPASAGADAGDGEQWRLAAADLSRRLAAATRTRDEALEETTRLKHSLAELEHKLAR

SEQ ID NO: 368175 - protein, 215 aa, Zea mays
  Clone ID: MRT4577_98948C.1.pep
RKRTKYLAHLPYGCEVGFLECDWTDTVSPEILERFKPDIEKRRKKHTEKETREEKARVRAEKAEYAEFASGRRKRNSISERFSADDFQPLASHIGAEASGVDGDTTSTSPPWPTRRGEGFASLASPSTSPSAPRTVWGTTAIASTSPSMGPQLDQDVDDGWLQGWEKDLLQEDDVIAQVQAMSLADEEAPKKQAGGKKKKGKKITLMSTNVRRGA

SEQ ID NO: 368176 - protein, 72 aa, Zea mays
  Clone ID: MRT4577_98949C.1.pep
PGGRGGDNLMPPPNPDLFDFSDLLTLPALFPLTGTQNAQALLLFPAVRTILSRGEVQEEILHSLPPLYAFTK

SEQ ID NO: 368177 - protein, 84 aa, Zea mays
  unsure (1)..(84): unsure at all Xaa locations
  Clone ID: MRT4577_9894C.1.pep
NKVIFLTLHRPRRILCPRTHWHGQRPCATQVKPQREAHMRAIADVDESQQQYSHDETRGNLMWMDPSWRAVWFSVSRPXPRXXT

SEQ ID NO: 368178 - protein, 85 aa, Zea mays
  Clone ID: MRT4577_98950C.1.pep
CSTTRKMLTNSHRGKQGKFDSTLGKKGGKLRDSKRSSATASTDSLRGRRKQELLWIDLTNMQLTVFLLPSGGTIPLPQGLLTYSP

SEQ ID NO: 368179 - protein, 38 aa, Zea mays
  Clone ID: MRT4577_98951C.1.pep
YCPFIRQSIYCLRTREKRGFSKHVFSDCAQLVMQCDIV

SEQ ID NO: 368180 - protein, 43 aa, Zea mays
  Clone ID: MRT4577_98952C.1.pep
MGWAKKAAVAETTARVVDDRSTVDQAVAYVLMAAALAVTYLVH

SEQ ID NO: 368181 - protein, 44 aa, Zea mays
  Clone ID: MRT4577_98953C.1.pep
LEWINSPQSPLFNQGTPNPFLSCLIIQRYFGSVGVRYPLNNVKK

SEQ ID NO: 368182 - protein, 628 aa, Zea mays
  Clone ID: MRT4577_98954C.1.pep
MDSNPKPSKCPRPIDERSKLSYEYSVESFCSIDDHLPDGFYDAGRDMPFMSLEEYERSLGLYAREVILLDREQDEELDTIASSAQLLLSSLTRPSSCEMEEDAGHDLLRASVLALFVSDCFGGCDRSASLGRTRRAIVSLRKEQPFVCTCSAGNLGDNNEAKQTNILSGHFDFAGLCNRSIHLIKERRNSGIVPIGSLQLGVCRHRAVLMKYLCDRADPPIPCELVRGHLDYTPHAWNIVPVKKRNGWVRMIVDACYPTNIKEETDPEYFCRYIPLSRLQIVLDDEGYTPRCSFPSVSSCKEIEVTPSSSVYHCKIGAVDAAAKIRYLDTRRVSNDEVKLFEYKLLGEVRMLGALRKHRSIVDIYGHQLSSKWVQVDGDKEYRILQSIILMEYVNGGSLKGYLTKLLKEGKKCVPIDLSVYIAREVACALLEMHKKLVIHRDIKSENVLIDLDPKRNAGAPPIVKLSDFDRSVPLYSLSHTCCISQLGTHPPDVCVGTPCWMAPEVVKAMHEKHHYGLEIDIWSFGCFLLEMLTLQMPYQGLSDTEIYDLILRKKQRPRLTQELEAFWTMDEPATRLKLGITSDAHADKLRHLIDLFYQCTRGHASRRPKAVQIYNSLCSLPTCYDMR

SEQ ID NO: 368183 - protein, 100 aa, Zea mays
  Clone ID: MRT4577_98955C.1.pep
PEISKLKTISLLVVDIQTVANLHLGAHSSTDASVDSPDTSSIRMGSFAVSVITHTTQMEGFAVLAAIFTITNDTDVVDDRTTISNMEGAATKRLLPILSG

SEQ ID NO: 368184 - protein, 29 aa, Zea mays
  unsure (1)..(29): unsure at all Xaa locations
  Clone ID: MRT4577_98956C.1.pep
FIFNQAPIXNSGGWSITLLYMNCASFSRA

SEQ ID NO: 368185 - protein, 88 aa, Zea mays
  unsure (1)..(88): unsure at all Xaa locations
  Clone ID: MRT4577_98957C.1.pep
PLEPXEQEKDPFLPIELNAGIKQLTNYYCKMFTANDTNTPGEFSDPRQXNQKVFPPLHLSQQCAVHELNAKHLPNNEGKPSHIQSRPP

SEQ ID NO: 368186 - protein, 75 aa, Zea mays
  Clone ID: MRT4577_98958C.1.pep
HRELQMEKTFLGIINSSKKLIMNIEKVGVGGVEGEGLVERGEGGKMILQMMIQMKINGSRIVIELERIGHQWIGE

SEQ ID NO: 368187 - protein, 68 aa, Zea mays
  Clone ID: MRT4577_98959C.1.pep
VVEVFSRIDHKFDLMYAKRAFVHWYVGKGMEEGEFSQAREDLAALEKDYEEVGAEFDEGEAAPQGDEY

SEQ ID NO: 368188 - protein, 112 aa, Zea mays
  Clone ID: MRT4577_9895C.1.pep
MTNTKGKRRGTRYMFSRPFRKHGVVPLATYMRIYKKGDIVDIKGMGTVQKGMPHKCYHGKTGRVYNVTQHAVGIVVNKQVKGKILAKRINVRIEHIKLSKSRDSFLDTCEGK

SEQ ID NO: 368189 - protein, 140 aa, Zea mays
  unsure (1)..(140): unsure at all Xaa locations
  Clone ID: MRT4577_98960C.1.pep
TIKRGERKIPSSDFVSRQNKSVYSGESLPRSHYLYFFFYFLQKGFPTDATLDDIKEWLDDKGQILNIQMRRTLHKTFKXDNLMXFLIVTYHCKEIFICPLQGSIFAVFDSIQSAKKVVEIPGQKYKDTNLLILXKXEDYF

SEQ ID NO: 368190 - protein, 71 aa, Zea mays
  unsure (1)..(71): unsure at all Xaa locations
  Clone ID: MRT4577_98961C.1.pep
MLDYCCQAATPGALFEDKPQSANDTWRKLHSDPLLLIRQREQDAISRIKNNPIXKMAEIKKSVKHAYRGVW

SEQ ID NO: 368191 - protein, 179 aa, Zea mays
  unsure (1)..(179): unsure at all Xaa locations
  Clone ID: MRT4577_98962C.1.pep
MGLAFGKLFSRLFAKKEMRILMVGLDAAGKTTILYKLKLGEIXTFFFTSXXXXETXEXKNXSXTXGXXGXQDKNRXXXRXXHQNTQXXXXXXDSXDXDXXXEARXEXHRXXNEXEXXXXXXXXXANKQEXPXAXXXXEXTDKXGXHXXRQRHXXXQSXXATXGEXXXEGXDRXXSNXAS

SEQ ID NO: 368192 - protein, 108 aa, Zea mays
  Clone ID: MRT4577_98963C.1.pep
IGYLEAGRDNLFYQSTLPLPCHIRTVRTDTPSVGTNGLLPRGGLLPQMKCRSSDHRPDFMARPWCRPEPRPQGEARGGRHGPHAPAPNTTTTMVTTSDTASWCARTGS

SEQ ID NO: 368193 - protein, 88 aa, Zea mays
  Clone ID: MRT4577_98964C.1.pep
IKLDNNPGRNGGKNHDLTPGSANSDGKRVFPLALNPVGDGALGKYSTLQVIKSSLFQTKPTGVVGLKKKNLPGKVHEQFLGYGLHTPL

SEQ ID NO: 368194 - protein, 78 aa, Zea mays
  Clone ID: MRT4577_98965C.1.pep
NYVNNYKLNENFQGKTELLYGVMEKTLNLLQMGFTEEEVSSAIDNFDQRATVQELADSILARRIANSIEQKEIKVESD

SEQ ID NO: 368195 - protein, 100 aa, Zea mays
  Clone ID: MRT4577_98966C.1.pep
GFASKSPFWENRGTPGGVSQPNPFVFRGAPPYNPVLNTKGGCSKTGPPPIGLKRANLNPRVIQKFFFPGHLGAPKKKPPGPGGPFSGQISPPLVGAPPFF

SEQ ID NO: 368196 - protein, 91 aa, Zea mays
  Clone ID: MRT4577_98967C.1.pep
GRAGTSSHRDLPEILIPTSSRNMPSRDKRRHIIIDPVCLAHGAALPDYMPVLSRSRRSWRVSMRCGVKQHLRAHLPRDPTSAQNLPRERHP

SEQ ID NO: 368197 - protein, 98 aa, Zea mays
  Clone ID: MRT4577_98968C.1.pep
RPVSAPCICYGLHLPLTDHLPASRSRDTETTPYLEMHVLMTVLAVISPLAVLMALHPRRDHLVCGPKYTHHTEELVYVAQPVVPSEPCNYSLIAQVLD

SEQ ID NO: 368198 - protein, 62 aa, Zea mays
  Clone ID: MRT4577_98969C.1.pep
NQQWHKKCHPVQTEVRLPAPFGVIEIPPGSCARSTDDPDRLRCSPQIGDINIFQNDVLGTLQ

SEQ ID NO: 368199 - protein, 84 aa, Zea mays
  Clone ID: MRT4577_9896C.1.pep
TAQGRTDPNMPTGNERQGRRKEPEQAHNPDRQQSATDQGRAGKENARTEGKESTIGDLIRPEGRAERKGEPGLKTRYDAENANT

SEQ ID NO: 368200 - protein, 64 aa, Zea mays
  unsure (1)..(64): unsure at all Xaa locations
  Clone ID: MRT4577_98970C.1.pep
SEALLLQRPRQLGXAPPPWVSATLPLRSWAGLPLPLWPCTAFLSSLNYRAFSALSASLASAVSC

SEQ ID NO: 368201 - protein, 29 aa, Zea mays
  Clone ID: MRT4577_98971C.1.pep
KIKRIGSTYVEMKNFNGWGHKNSNYGKSK

SEQ ID NO: 368202 - protein, 68 aa, Zea mays
  unsure (1)..(68): unsure at all Xaa locations
  Clone ID: MRT4577_98972C.1.pep
EPECDRKALVEPPCPAHVWEGDXDGLVPVVLHRYLACKIGWINYHELSGTGHFLSXVPGLGDNVLRTL

SEQ ID NO: 368203 - protein, 134 aa, Zea mays
  unsure (1)..(134): unsure at all Xaa locations
  Clone ID: MRT4577_98973C.1.pep
GRCPVPTALRFRNLTERLERGKDSKAGMGSPSSLPANTTLMLLALLSRAQSRXAQFYTSDAITENFXTPSXAIMYWVPLHKALTTCYRQPNCACPYDNRSACGFKHTNQYPFMSIDSYXNHTLFKDCKACCSCY

SEQ ID NO: 368204 - protein, 92 aa, Zea mays
  Clone ID: MRT4577_98974C.1.pep
RKANRLFFTQYTYVSGGLKNKLPLRSKPHLKGGLKKKHRGFWCLTHNSTKHAHVTSWKIKKTQPFVLDGFQKLKIISCIIYSFISQRAKRGD

SEQ ID NO: 368205 - protein, 82 aa, Zea mays
  Clone ID: MRT4577_98975C.1.pep
WCLTSRSHIASYSIRDVARTRALDASIGRIYCTTLDHQLDMPSPLPRRGLNFLCTIYMGMSLLVRGILCTHPRMLPESYFYF

SEQ ID NO: 368206 - protein, 92 aa, Zea mays
  Clone ID: MRT4577_98976C.1.pep
SCMVSVGLFIVSSVACVSFRLLLTVWFVVICVSVSRRRSLCVQDLFVGLVGDHVEWSVCVEGYGVDTVMLIVRRGSSSSFFVSLAVEIVCAG

SEQ ID NO: 368207 - protein, 146 aa, Zea mays
  Clone ID: MRT4577_98977C.1.pep
MEPQCNVGMFTRAELLEASVELRHHALGYVKSTALRCAVKLGVANAIQRRGGRASVEDLLTELSLDASRLRCLHSVMRALAALGVFKEGSDGEYGLTAVSSLLVDDDSSVRDWALAGVDGSDDDNNCSARRTAFKMTHGQDVWDVL

SEQ ID NO: 368208 - protein, 642 aa, Zea mays
  unsure (1)..(642): unsure at all Xaa locations
  Clone ID: MRT4577_98978C.1.pep
MDQYEVLEQIGKGAFGSALLVRHKLERKKYVLKKIRLARQTDRTRRSAHQEMQLIANVRNPFIVEHKDSWVDKGCYVCIVIGYCEGGDMAEAIKRANDTHFSEEKLCQWLVQLLMALDYLHAHHILHRDVKCSNIFLTRDQNIRLGDFGLAKILTADDLASSIVGTPSYMCPELLADIPYGTKSDIWSLGCCMYEMAALKPAFRAFDMQNLINKITKSIVSPLPTRYSGAFRRLVRSMLRRSPEHRPSAAELLKHPHLQPYVLQLHLKSHLSRSIVPVHQSPSEKRMTFAAEPVCRRNSLGSERMIAAFSKPSPDRSSVSSIRSVKDDYTATQSVRELSVDDSMVEAASKPVASRTSDVMRTPKATPWKMMATLRNRLEAPQASYDNESYRVXRTPVDKRNSRVARRASLPLPVFETPKQRSSMSVLEQLESPDVSVNSPRIDRIAEFPLASCEDPLFSTVKPPTPASASASATPPFVDRSITKDKCTAQTLRSAARDGGNGRSEDGGGLSSGRTTTTAASSGGTSGSLQPKGRFDTTSYQQRAEALEGLLEFSAQLLQQERYEELGVLLRPFGPDEMVSPRETAIWLTKSFKEAMATGLQRWPPCTGMDGSGIQDRPSALQAVDGRMASPVLACVGQVGRL

SEQ ID NO: 368209 - protein, 365 aa, Zea mays
  Clone ID: MRT4577_98979C.1.pep
MEPQCNVGMFTRAELLEASVELRHHALGYVKSTALRCAVKLGVANAIQRRGGRASVEDLLTELSLDASRLRCLHSVMRALAALGVFKEGSDGEYGLTAVSSLLVDDDSSVRGSLRPITLLYLEPAFMAPVLNLADWALAGVDGSDDDNNCSARGTAFKMTHGEDVWDVLARDAFLGDFFNGALASETRFLMDIAIRGSPQVFEGIASLVDAGGGTGAAAQAVAAAFPDTRCTVLELPQVVDAAPIDGPVRFVGGDMTKFIPPADAVLLKNVLHDWSDKDCVIILKRCKEAIAASGKVIVIDIVLGSSSLAICNETQLWLDLFMSTVTTGKERREEEWYRLFKEAGFSAYKICPVLGLLSVIEVFL

SEQ ID NO: 368210 - protein, 65 aa, Zea mays
  Clone ID: MRT4577_9897C.1.pep
FPNKYFFKQHGHGGGFVFLTRLFEQKLIWNRRKSYLRGEERKKHRPPWPNPPSGFFRRFVYKKTN

SEQ ID NO: 368211 - protein, 61 aa, Zea mays
  unsure (1)..(61): unsure at all Xaa locations
  Clone ID: MRT4577_98980C.1.pep
MMXXXTVAAXLAVAXGFGKXLCXXXNAPSFRXVAGAPRRRSVRTMAVVRASAQKQHSVKEW

SEQ ID NO: 368212 - protein, 127 aa, Zea mays
  unsure (1)..(127): unsure at all Xaa locations
  Clone ID: MRT4577_98981C.1.pep
AEHKKRLSYHIALGKXTTTXHYCTALALPALHDLISNIISAISPPDWTVLIIYSTPPLLDVRISSAGLTRAHDLLSLTPALKRMIXCCDATKWMTPLHYTARYDVIVKGMSSHPTSGEYNPALIALA

SEQ ID NO: 368213 - protein, 80 aa, Zea mays
  Clone ID: MRT4577_98982C.1.pep
MTKLPAAGRPRLTLEDYVLFFTTRSGRDLTVDQLNQILFMHGFKKFYNSNKPVIVDALNSLDLLRPRRATVSINAVAPPP

SEQ ID NO: 368214 - protein, 82 aa, Zea mays
  Clone ID: MRT4577_98983C.1.pep
QNPHVSIYRLPKPHQVNACHQRPLLIDQHHLKVSIYVTHNKTGLLTGTVPSNFLWLQVFVDRDFLIWRLFRPKEHGVSARAE

SEQ ID NO: 368215 - protein, 125 aa, Zea mays
  Clone ID: MRT4577_98984C.1.pep
LGSKALLHPLISVQQNHRVRGPSSADNKNISVSSPSTSVLQHSSCIDEDRRSDLRSKGRERNPRKAKMIYRNWSLLSSTVVIWGGVATAGLAGIFLLGGKEKFNGYLCREGERLRQQDRATMGRS

SEQ ID NO: 368216 - protein, 43 aa, Zea mays
  Clone ID: MRT4577_98985C.1.pep
IVNSIPVLSSHSVISRASLGNYCLSRRRYKHTLNIVFKHFRFR

SEQ ID NO: 368217 - protein, 97 aa, Zea mays
  Clone ID: MRT4577_98986C.1.pep
LCSSRGRPGSVLQHSSCIDEDRRSDLRSKGRERNPRKAKMIYRNWSLLSSTVVIWGGVATAGLAGIFLLGGKEKFNGYLCREGERLRQQDRATMGRS

SEQ ID NO: 368218 - protein, 64 aa, Zea mays
  Clone ID: MRT4577_98987C.1.pep
KAQVVRLFPRRNPSTAARPGAYVARWARDTTRTQPSCSACHCAPALPYRTTPTSLPVHARIRDS

SEQ ID NO: 368219 - protein, 30 aa, Zea mays
  Clone ID: MRT4577_98988C.1.pep
YLRFYFKNVWNEMKVERISVELMVVKKLDE

SEQ ID NO: 368220 - protein, 137 aa, Zea mays
  Clone ID: MRT4577_98989C.1.pep
GHAFGDALVRNLIFNQKRHCRLPPSPSSFLAGIGHLHLLKKPVHRTLSALAAQHGPVLLFRFGFRRVVHIADPAVAAECLSTHDVTFANRPRLSFARYLFNDYTTLGSSSYRPNWRNTCRISTVDIFSSHSVLCSAD

SEQ ID NO: 368221 - protein, 64 aa, Zea mays
  Clone ID: MRT4577_9898C.1.pep
GRTCTGGPAPHLGNRHATSSGDPAYASDTHPQGTLSIDRGVPPCSWDSDRLYLDSASNSHRPSR

SEQ ID NO: 368222 - protein, 91 aa, Zea mays
  Clone ID: MRT4577_98990C.1.pep
AVYFCTRTRPQYGFDVWGQGTWVTVSSASTKGSSVFPLAPSSKSTSGGTAALGCLVKDYFPEPVTVSWNSGALTSGVHTFPAVLQSSGLYS

SEQ ID NO: 368223 - protein, 101 aa, Zea mays
  Clone ID: MRT4577_98991C.1.pep
RVHRGAPTGLVPGVARAGTPRPRPPVPPVAGSPAAPPRSRRGAGGGWRQARGRPGRAAASPSRRGRRRGGRGGARCGRRRGGAARAPSGPVVAPPPPPPLP

SEQ ID NO: 368224 - protein, 47 aa, Zea mays
  Clone ID: MRT4577_98992C.1.pep
GSARFWISRCLIPNVSNSYSSSFSLFLMFFLILPSSLIILFVYANTY

SEQ ID NO: 368225 - protein, 84 aa, Zea mays
  unsure (1)..(84): unsure at all Xaa locations
  Clone ID: MRT4577_98993C.1.pep
GGAMGGLRQHTVLISTQHDETVTXNDEIGGDLDEHVIEPDIADQYHYXKTMCQLNTSGRFIIGXPDRHARVTGRQIIRDTYGGC

SEQ ID NO: 368226 - protein, 102 aa, Zea mays
  unsure (1)..(102): unsure at all Xaa locations
  Clone ID: MRT4577_98994C.1.pep
LMEELKCRNRSYTTCLMQTAFPGYSSADHCPDFTMFFSRHMSSNAMLLLPSHLKTGLXSRQELEAGVDLVGVLGHAGRRLXTSASLATERXIXXCSACSPCP

SEQ ID NO: 368227 - protein, 155 aa, Zea mays
  Clone ID: MRT4577_98995C.1.pep
PKKNKTGKSGQPGKKRRTGTKRKGRKKNGQVRGRWRGKGKPWGCVQPPQRGSIFQKERPIAGKANGGGHCTKGGTAKRKTLHKKKKGEKGGNSGNPQGLGRPQGFKKTAPKKGKRGPTKKKNRTPPPPWGENTPKFPPKRDRRSTKPQNLAEGRS

SEQ ID NO: 368228 - protein, 87 aa, Zea mays
  Clone ID: MRT4577_98996C.1.pep
SVPLRPKISLYLHLDVTAVGGRNHYGDVDRTKTSSRMRQVKRFIALVGVESDSSSTQYFEHMTVSDHDVAHLLQVILPVLQKSKRRV

SEQ ID NO: 368229 - protein, 232 aa, Zea mays
  Clone ID: MRT4577_98997C.1.pep
LATPSSAPTARPSAIPPPRRDQRFKMSNRATHWCYACRRPIRLRGQDIICPNCNDGFIQEISETRGALNNYGMFGPRFDDRLDGRFGMMDAMSALMRRRMAEMGSNPVFDPNAAWASTTQGRPSPIGPRLIFGSNMPAQGSDDSGVNVLVRGGRRIGADRPNFSGFLVGGPSLEALFEQLLLQTGNRQGPAPAPQSVIDSMPVVRITRRHLSDDPVCPVCTERFEIGSEARE

SEQ ID NO: 368230 - protein, 85 aa, Zea mays
  Clone ID: MRT4577_98998C.1.pep
DRVLLQQIDAYNDFLKSFAKLARSAWTRFDLWSMGIGLLLMILSVIIQASMLVNMTISQSSDQKSSGSSIIRRLSLAFSLVVIRA

SEQ ID NO: 368231 - protein, 74 aa, Zea mays
  Clone ID: MRT4577_98999C.1.pep
LLCMRFLCREGAPAFLRAARGSSFSSALSSPVLRHGLDVALRFHLLRRWGAPGCRCLPRPVDTFRALVRGHPGA

SEQ ID NO: 368232 - protein, 145 aa, Zea mays
  Clone ID: MRT4577_9899C.1.pep
YNRRMSPVVAAGQWRKGCQWFDLDRTLAADVVADRVYFPLFRRFCRRRHCYADEHYLPTLLNIVRRPSAGANRSLTWVDWSHGGCHPARFTRMKVTVDFLRWLREGSTCTYNGRTTTVCFLFARKFLPNSLTRFLRFAPKVMGFG

SEQ ID NO: 368233 - protein, 103 aa, Zea mays
  Clone ID: MRT4577_989C.1.pep
LDIHDRVLHPDRGPNVFQGPDLLRYMYVQLRPVGCEGSATIFDMSALSLATICSGYIEIALAVYMLEPELDWYILPTCLLIEAACTTVPTYALVLDRRQKTLS

SEQ ID NO: 368234 - protein, 129 aa, Zea mays
  unsure (1)..(129): unsure at all Xaa locations
  Clone ID: MRT4577_98C.1.pep
PTLKKEVCYSDYALPFCXSNNISERAEKIGEDRHENRIENSPYTLEMXSLTCGKHSARYLLAEKELKLLNEKIEDEYRDNMILDNLPVIDPIQRVNEEGAYFYQRGFHVGDKGKYSRSIDEKYFVHIIY

SEQ ID NO: 368235 - protein, 53 aa, Zea mays
  Clone ID: MRT4577_99000C.1.pep
LKEYSQSFTALSKKFCSLYFLHLQQCPLNFILYINSVPYFTFYIDFYRSCACE

SEQ ID NO: 368236 - protein, 574 aa, Zea mays
  unsure (1)..(574): unsure at all Xaa locations
  Clone ID: MRT4577_99001C.1.pep
MADETKQEAAAPAAEVVVTEEEKKAEETAPVAEEKAVEAAVEKAAEAEAGAEEKAAEADSEEEKKAEEAEEAAAGDEAAVIDGTGSFKEESNLVSELPDPERTALAQLRELVATALANGGFNLPPRPXPEGDGEGAAGVGKSXRAAPDEEPKAERAAAQDTVKEEAKLEEHNPEARRKTVPGGLKEKTPETEETDPEAEAPEXPRPXSAKGEAKAKATDGQAAPETKPSEPTSGDEVQFCTRGEGEGKKTNKAFQQTVAGPFPAAAAEEPEAXASPKEELIWGVPLAGDDERTDTVLLKFLRAREFKVKEAMAMLKSAVLWRKRFGIDELLLDADLGLRELEGVVFYRGADREGHPVCYNVYGEFQDKELYERAFGDEEKRERFLKWRIQLLERGIREQLDFSPSGICSMVQVTDLKNSPPMLGKHRAVTRQALALLQDNYPEFVAKKVFINVPWWYLAANKMMSPFLTQRTKSKFVFSSPAKSAETLFRYIAPEQVPVQFGGLYKEDDTEFTTSDTVTELTVKPSSKXTVEIPATENSTMVWELRVLGWEVSYGAEFTPEGEEHQRVSVRSRR

SEQ ID NO: 368237 - protein, 43 aa, Zea mays
  Clone ID: MRT4577_99002C.1.pep
PVVLGVAPEKKAAPEFVEPPGESGEPAPGCSWGGNCKCDPCNC

SEQ ID NO: 368238 - protein, 572 aa, Zea mays
  Clone ID: MRT4577_99003C.1.pep
MAEETQPEAAAAAAAPAAAEVVVTEAAPAEAEVPAAAEAEAEAKDEKKGDEAELTADDAGVGTGSFKEESNLVEDLPDPEKKALDEFKQLIAAALAAGEFNLPPPPPPPKAKETKVEEAKAEEPAKEEPAAEAEATAEEPKAQVAADAPVEEVKTEVPPAEEAKAETLAEEAKPSEPEPQEKTVVVTEEETATKTVEAIEETVVSAPAAIPEEAAAPEAVVEAQATAPEPVLIWGVPLVGDDERTDTVLLKFLRAREFKVKDAMAMLKSAVLWRKRFGITSLLDADLGLTELENVVFYRGTDREGHPVCYNVYGEFQDKDLYEKAFGDDEKRERFLKWRIQLLERGILSKLDFSPSGICSMVQVTDLKNSPPMLGKHRAVTRQAVTLLQDNYPEFVAKKVFINVPWWYLAANKVMSPFLTQRTKSKIVFCSPGKSAETLFRYIAPEQVPVQFGGLYKEDDTEFSTSDAVTELTVKPSSKETVEIPATENSTVVWELRVLGWEVSYGAEFTPDAEGGYTVIVQKTRKVPAHEEPIMKGSFKATEPGKLVLGVNNPASRKKKLLCRFKVRSAAA

SEQ ID NO: 368239 - protein, 123 aa, Zea mays
  Clone ID: MRT4577_99004C.1.pep
ESSASADDAPRADAWRRRPVLARSSYRCPLSFSLPSAVAAGEVGSGGLAGRRGSARQLKTVGKGRSAARAALAHGSHRGSGGRAWWPSGTRWLGGAAGSGGLVVHGDDDERWGRWRLWTSCRI

SEQ ID NO: 368240 - protein, 118 aa, Zea mays
  unsure (1)..(118): unsure at all Xaa locations
  Clone ID: MRT4577_99005C.1.pep
EVTLVCRFSVRFXLPGPAFALHPLXVVRSFSYSVVRLIPSIXRGGEQGSIFNIVAAPARQXDYAXAXGEGGGXEXASRPGEGXKGEGFGXXXRGHXXYSXGHXXGXLHXXLQVLSFPS

SEQ ID NO: 368241 - protein, 69 aa, Zea mays
  Clone ID: MRT4577_99006C.1.pep
GLEFPYFICWGVLEVWIPGFGDFEKLGNGCFFVKLGPRPLSGKNHGRFLFWNCFLVECLVGGKFHFCLV

SEQ ID NO: 368242 - protein, 79 aa, Zea mays
  Clone ID: MRT4577_99008C.1.pep
TESYYGSYRLLSLMIPSLTVSRCLLSEHFPLSQPIHPRFCHHTGVSVSCDSRSDIHSQPHVTTDILDSVIADWPCHLQS

SEQ ID NO: 368243 - protein, 73 aa, Zea mays
  Clone ID: MRT4577_99009C.1.pep
QFTSTVGGLVHGLRPAFCLLFRPSLVHLSHAQRSNGHLDGLLLDDFGVLVGPLLVCSFVLRYVLGVEHTPGSV

SEQ ID NO: 368244 - protein, 99 aa, Zea mays
  unsure (1)..(99): unsure at all Xaa locations
  Clone ID: MRT4577_9900C.1.pep
KSEGHGGTAGNKFXMSLGLPLIATMNCAGNTGAKNLYIISVKGIXGRLNRRPSACVGDXMENGKPNLRKKVMPAVIVRXRKPWCXKDDVYMYFEEARQI

SEQ ID NO: 368245 - protein, 71 aa, Zea mays
  Clone ID: MRT4577_99010C.1.pep
PHCLPERAGDHVHDQVKAGVDDCELDCGRGRCLSHNWKLSGKDACQNYNTGAVESARCGPIKSSGRRQTAR

SEQ ID NO: 368246 - protein, 137 aa, Zea mays
  Clone ID: MRT4577_99011C.1.pep
TVDSSSSWTSIVASLRGASLTPPVEAVMRRPRVVSRVFLVSRISGRRPRWVVPYAIPTSGVPTTVRQTKPTLLFYYMTAFPDINSSTGQELVAHQALMTTSRTIRWTPGSLLGWLCPIVRSERVATNGSRICSSCPL

SEQ ID NO: 368247 - protein, 209 aa, Zea mays
  unsure (1)..(209): unsure at all Xaa locations
  Clone ID: MRT4577_99012C.1.pep
MDALVDAALSTFLGTRLAXPAPHNGRIAPRFVFGLVGKAKPAPKKVAKTSTSSNRPLWFPDAVEPDYLDGSLVGXYGFDPFVLGKTVEYLQLELDSLEQNLVKNEDGGIIFTRFESSEVESTPMQAYSEVYXLQRLRECXLIHGXRWVMLDTLVALSVERITAVTWQDFSIVXLEDASSYLGQTLPLSVSTFXWIQVLVIGYIEFQCFD

SEQ ID NO: 368248 - protein, 113 aa, Zea mays
  Clone ID: MRT4577_99013C.1.pep
KFLRNRWGRTNLFFYGDQDKHVTRFLLLLFLLSFLHQVLLVEIAWSSRASLVRHHACEPRVQRQHGLLPPHRPKSRAHQRCRELVVLHSPPLSFAGVRLTGQSNPPIAGEAQY

SEQ ID NO: 368249 - protein, 69 aa, Zea mays
  Clone ID: MRT4577_99014C.1.pep
EFSAAHIPSWIAHQNGTHCMLGTWNEALPEPDEAALLKPEPLKTATRWHSVPRRCPAEVEAGDVAPRAH

SEQ ID NO: 368250 - protein, 211 aa, Zea mays
  unsure (1)..(211): unsure at all Xaa locations
  Clone ID: MRT4577_99015C.1.pep
MASAAAASSAVKEALVVVAVCIVLLLHSSAGHQPPKSPPPPHCHYTGQQPPPSPVPASLYSPPPPPPVPAPMPSPSPPPPPPPVQAPMPPPPPPAPTPTPAPTPTPSPSPAPVXTAATCTAPCNVARSAKPTTTPASPSAKATSPPTTTGATTAAPAMSAPATPAPAVAAASATAPATTPTRPAAANPAATFCTARSSAAGITTTGLWSTA

SEQ ID NO: 368251 - protein, 165 aa, Zea mays
  Clone ID: MRT4577_99016C.1.pep
MASAAAASAVKEALVVAVCIVLLLHSSAGHQPPKSPPPPHCHYTGQQPPPSPVPASLYSPPPPPPVPAPMPSPSPPPPPPPVQAPMPPPPPPAPTPTPAPTPTPSPAPVNNCSYMYCAMQCSPVCQANHDAGIAKCESDLATNYNGCYDSCTSHVCPGDSCARSG

SEQ ID NO: 368252 - protein, 148 aa, Zea mays
  unsure (1)..(148): unsure at all Xaa locations
  Clone ID: MRT4577_99017C.1.pep
SSEATCTAISQARYNPXTLWGXVEVHMEHCPVLEXLHYSLGXVXGIDRHTQLKVXMXGSLGHAVTVPMNLHRDPIVADAHLDVTLELLCKEPNTSLTYDEECICYTAECLTRLICTLAXLYTWPRSSKGIAGQVNFTADIRAMDHQMR

SEQ ID NO: 368253 - protein, 117 aa, Zea mays
  Clone ID: MRT4577_99018C.1.pep
GNPPGFPPLAGVPSGFFRRGAFGRLPFLFVPGLKRGAFPPFFSKIKPFFCPPPWNKCLLPWGADPLLAPVASPPSWFFWLLERKKKKNPFLGLARPGSIFFFFFFPFFELNLNVGLP

SEQ ID NO: 368254 - protein, 78 aa, Zea mays
  Clone ID: MRT4577_99019C.1.pep
SHGAKVLSPEICRPPSVPCSGQARPQGVYFPLCTSWPHVDHNILPDGELVRYETRDAGGILEKRWESVLRSRWVALVA

SEQ ID NO: 368255 - protein, 1074 aa, Zea mays
  unsure (1)..(1074): unsure at all Xaa locations
  Clone ID: MRT4577_9901C.1.pep
MQSTDGXKTIFGTMVLDMMVNSARGAKRQQGLGDLTQLLTKEQADLGVISVWGTGSELGTTSIIRKAYQDPELCQKFECRGWVKLTQPFNPHEFLRSMVAQFYANSCLQNGIVINVDELKRIEEMATTGGGLIGAFMDKVNENRYLIVLENLSTIGDWDTIGTYLPDRKNGSRVIVSTQQCEIASLCIGHSYQVAEVKQYSAEHSVCVFFEEGLQGNGDKSMESDRVVDNNNEMSMQDEITHGTGFLSDRIPTSKRKDASDWVKNFQLVERKSEMNQLGNYIAKARVYGLQILSVWGIAGVGKSALVRNMYFDRIHRNDQLFEKYGWVDVTHPFNLRDFSRSLLLDFHSEPVQAMGIKDPTQECHKILEDNRCLVVIDDLQSIEEWDLIQAALVSRPSRSIIIVITTEASIATYCADNEGVVFNVKGLEDKAALKLFKKQVHRQKPSSPIKDSIDEELQELILKCGGLPKVIVAVANFLAPKTVSWMDSASSMNLKFMQELESSPEFACLQPLFGWLHSYFRTCPDFLKPCIFYLSIFPRDHSIRRRRLVRRWIAEGYARDTDKISAEERGEQFFCRLLDLSIIMQKPYSVTTGFRDSRMTLCQVNSFVREYIISRQMEENLVFELGGSCTLTSQRMGRHLIILKSWDRDRIVFESIDFSRLRSLTVFGEWKPFFISDRMRLLRVLDLEDASDLKDEDLKQMMKLLCRLKYLSLRGCTGIYSLPNSLGCLRQLETLDVRHTAIATMPRTITKLKKLQYLRASTTKPTKXNNQXTRYCCYTQTNKETTKSTHLXYHGRHPCXHRHRQLEGVVVPTGLEKLTALLTIGVVNVNSARGRSILKEVRKLTQLRKLGVSGISRNNSKDFCLAISSRAHLDSLSVKLKKDNQDCLCVTPDGYLPPKNLQSFKLYGLADSFPKWINQLENLRKLVLEMTILTQDTIKGLKDLKVCILRLITKQLPDGKLNFCVMLHGQQLRCYETVKILEISCSSSLDVAFGSQSLQNLELLKVSCCSGSGSVMKLSGLEKLSESELKEVQIKGSDDFIVKTDVEEQLARHPKKPVLKLEKVLSSTGDFEL

SEQ ID NO: 368256 - protein, 55 aa, Zea mays
  Clone ID: MRT4577_99020C.1.pep
LVLLPFYNLVVLSFHRVYTSGTPKWCEKMTVLHILFLEQRGDTIGDDPTSPTSQT

SEQ ID NO: 368257 - protein, 50 aa, Zea mays
  Clone ID: MRT4577_99021C.1.pep
FFYTRRRTTKGGPYFFSAGRPLLTIHLNSQLWLRISHKLIISIFRQYHNS

SEQ ID NO: 368258 - protein, 148 aa, Zea mays
  Clone ID: MRT4577_99022C.1.pep
HWVPRGRPGFPRAQERTTILSESSVFRLITAQAAQSPPRQPLVVRCSTSASPELPDVSFLPSGLSAMKEVYAEQICLFAASTVLFFRCVLSFSARAAKGRVCKVATEKTMTCVQGLGEGLVDVIDRSSRGGWAHAEHHRSGAYASRGR

SEQ ID NO: 368259 - protein, 179 aa, Zea mays
  unsure (1)..(179): unsure at all Xaa locations
  Clone ID: MRT4577_99023C.1.pep
PVFLIDPLKRLLDPTILNSSMMNPNENNKDNHQHKGANEADVLYKEAQIYHCHFRLEKWHTVPHQQLQTPGEPFXRRDDCCVIAYDVDASNGVEELDNCQEESIIPXTSXDPDNVGFVXLAMQIYARRRTXRHAPEKNDNDCRGYQACMPYSEREGIEGLIVDVEFQCKDGNACWNDAE

SEQ ID NO: 368260 - protein, 106 aa, Zea mays
  unsure (1)..(106): unsure at all Xaa locations
  Clone ID: MRT4577_99024C.1.pep
MAASANSQDSXAEATHHEILXISCRYPLEFTRYCADPLSKIXDIKLFAAILAGRLLATRIEPPAFMATSSNYADATIKRDIDVAQETAACNPSGAANTTQHHTGHM

SEQ ID NO: 368261 - protein, 153 aa, Zea mays
  Clone ID: MRT4577_99025C.1.pep
MANSNLPRRIIKETQRLLSEPAPGISASPSEENMRYFNVMVLGPAQSPYEGGVFKLELFLPEEYPMAAPKVRFLTKIYHPNIDKLGRICLDILKDKWSPALQIRTVLLSIQALLSAPNPDDPLSENVAKHWKSNEAEAVETAKEWTRMYASGA

SEQ ID NO: 368262 - protein, 105 aa, Zea mays
  Clone ID: MRT4577_99026C.1.pep
RAGIYQTHCRVSCVHPEEPSTRSSEGNPLVFSRHRSGKRGSTDETFIPSEGSNPMRWINAALHARNPQELLDRLLADAHERLRSGVEYAVSALERDSGDTLRRVS

SEQ ID NO: 368263 - protein, 64 aa, Zea mays
  Clone ID: MRT4577_99027C.1.pep
KHRMISPLGFRQLIFGQRANTHRVESICFTFVTVDIITLIEFCLRKTIGLVYWFKVEWVGVQHT

SEQ ID NO: 368264 - protein, 115 aa, Zea mays
  Clone ID: MRT4577_99028C.1.pep
GQRGAESTYRFERIPTWVTDVGCRPAIAAMNLYLSSADNSSNNRYFSIINPKNALSDRNGVCTKCSTCLMGQFQRIHLSYTRHTRALPKRAGHVASSSCVMPVTEENVERVLDEV

SEQ ID NO: 368265 - protein, 63 aa, Zea mays
  Clone ID: MRT4577_99029C.1.pep
MGPRAVALALLAEALIHALAPASAAGGLVRVSAEEAASRPEPPRGRGGWAGGGRALTCRLQRP

SEQ ID NO: 368266 - protein, 131 aa, Zea mays
  unsure (1)..(131): unsure at all Xaa locations
  Clone ID: MRT4577_9902C.1.pep
QNFNVEIWKSYLCIKICEDCPPQTRGVFWWSEVYEGHGGTAGNKFXMSLGLPLIATMNCAGNTGAKNLYIISVKGIXGRLNRRPSACVGDXMENGKPNLRKKVMPAVIVRXRKPWCXKDDVYMYFEEARQI

SEQ ID NO: 368267 - protein, 93 aa, Zea mays
  unsure (1)..(93): unsure at all Xaa locations
  Clone ID: MRT4577_99030C.1.pep
ADTQQFVPFRRVAAVDSPAYXQQPQLVPVSQLASVSRGAFLAHPQLLPFHQHEAPNGGPPPPPREGPPGGGRAGRDPKEINQQTKKGGDIKKK

SEQ ID NO: 368268 - protein, 216 aa, Zea mays
  Clone ID: MRT4577_99031C.1.pep
MAYRAEDDYDYLFKVVLIGDSGVGKSNLLSRFTRNEFSLESKSTIGVEFATRSIRVDDKVVKAQIWDTAGQERYRAITSAYYRGAVGALVVYDVTRHVTFENVERWLKELRDHTDANIVIMLVGNKADLRHLRAVSVEDAKGFAERESTFFMETSALEAMNVEGAFTEVLTQIYHVVSKKALDIGDDPAAPPRGQTISVGGKDDVSAVKKSACCSS

SEQ ID NO: 368269 - protein, 160 aa, Zea mays
  unsure (1)..(160): unsure at all Xaa locations
  Clone ID: MRT4577_99032C.1.pep
MGTPEYLSNDENATQLCGERASLRNAAKALDVSIVRQRKHGMIECQVYNSIXDERINDMDKQNVKKLVLLADISSPTXAMCLSXGALLPPGGSGNAGAXTKYKERLGNDIAXEECLNTXHVPNDRTTPAGAYRMTPRYQWAQQDNTLTAYEIDSKSTHRM

SEQ ID NO: 368270 - protein, 216 aa, Zea mays
  Clone ID: MRT4577_99033C.1.pep
MAYRAEDDYDYLFKVVLIGDSGVGKSNLLSRFTRNEFSLESKSTIGVEFATRSIRVDDKVVKAQIWDTAGQERYRAITSAYYRGAVGALVVYDVTRHVTFENVERWLKELRDHTDANIVIMLVGNKADLRHLRAVSVEDAKGFAERERTFFMETSALESMNVESAFTEVLTQIYRVVSKKALDIGDDPAAPPRGQTINVGGKDDVSAVKKSGCCSS

SEQ ID NO: 368271 - protein, 81 aa, Zea mays
  Clone ID: MRT4577_99034C.1.pep
VNRQYVCLQRFTLCSLDRHVSLVVALTQWRQASSVRQKQHLVVPAVVARDLGFKVGRLVTLDVLWAWSPVKALHRSFPLFL

SEQ ID NO: 368272 - protein, 87 aa, Zea mays
  Clone ID: MRT4577_99035C.1.pep
HCSYHVWVPVFSSHGFLFTQKFGCYLQFTSDTACKHSKDITFILMQENQMCIYFRKVKTAVAIYHRQNQDDFPNKNIIYERFPNLIS

SEQ ID NO: 368273 - protein, 117 aa, Zea mays
  unsure (1)..(117): unsure at all Xaa locations
  Clone ID: MRT4577_99036C.1.pep
FPRLFSFVAVRFFXGLLLXRGCCSFGXGXCVXAXLXXXXPWCLXXXXGXAGSSWAXXXXXXXAVXFLVXLXXXXXPXXXXXXVCALVLGXXXXXXSGPSAAPLRFCFLAAVAAEGAS

SEQ ID NO: 368274 - protein, 72 aa, Zea mays
  Clone ID: MRT4577_99037C.1.pep
ICLSYGLVSGGSPSFFVTIAALTASPPMYCAPSVKPCIFHLPRVYVQEQMEQGAHEVAAIGYAASEAAVGTS

SEQ ID NO: 368275 - protein, 136 aa, Zea mays
  Clone ID: MRT4577_99038C.1.pep
MSAATSVSLAVADAVWAEIRSAGRASDEHLSILETLFGKNMLRACKIVDERGVRRVTGAPSGRSVFLVLGESKRKEEYLCFPEHLCTCYSFFYDVVGRGEQLSCKHQLAARLAEAVGEHQEVEVKDEELANMLVNL

SEQ ID NO: 368276 - protein, 86 aa, Zea mays
  unsure (1)..(86): unsure at all Xaa locations
  Clone ID: MRT4577_99039C.1.pep
HCSSNCNHRLHMKPIXLEKDDDTTFHMDLTGXLHRRARDYSIPEVDQLQGNFIAGRIITAIGTSTAMGTGLVCLQLYKGPAGGQKV

SEQ ID NO: 368277 - protein, 152 aa, Zea mays
  unsure (1)..(152): unsure at all Xaa locations
  Clone ID: MRT4577_9903C.1.pep
RDTEVDHCKEWNSYRRDKGEPGYDPXIYKEILKXFEKPXRHTRRDAPVHELYPSKMNXEETAPVLAEAVLYLTKEADTKTRDVKALQPTCCPLYGEICXDNFLNYMDNAPHEVLNAIHEXQSCGLGLAVNNNFIAPSLPTIQLERSGGLPEL

SEQ ID NO: 368278 - protein, 109 aa, Zea mays
  unsure (1)..(109): unsure at all Xaa locations
  Clone ID: MRT4577_99040C.1.pep
FWGFFLFVVLFFFVMTLTXSCKTQRREFLDTIDNVGGKTHHKEGXPFXQQRLIFFGKQLEVVRTLSFGRVPKESTLHLVLPLMFGTHMFAKTLGGGTXPLEVESSEGRD

SEQ ID NO: 368279 - protein, 89 aa, Zea mays
  Clone ID: MRT4577_99041C.1.pep
RTIGNCFKGPVPVYVIILIWCLECRYYPGPCCCDLGVPKALVFSWNYNMQLALVQGSDQQHFFMSRTFSSNSSSCASFKKKKRAAATAV

SEQ ID NO: 368280 - protein, 60 aa, Zea mays
  Clone ID: MRT4577_99042C.1.pep
RANCTIKFIERPSTVKIVSSSSSTTHPRLILATVILLSVLAAANTSADTSCMPRLAIPYN

SEQ ID NO: 368281 - protein, 68 aa, Zea mays
  Clone ID: MRT4577_99043C.1.pep
FGVEWTPLFWQTKHHAASIRTILTLRRCYPLASIRLRRRDPAVIWCPAPVEQEQHCVHHDEQHFFFFC

SEQ ID NO: 368282 - protein, 140 aa, Zea mays
  Clone ID: MRT4577_99044C.1.pep
FFFFFFVPGCDWIRAVVGRRKRRRSVRREVDLCPSEETGARATLGDPAGPAASAATAEAKSVAQARAVRAPQASLLSHPTAGKLLPYLILIALYLYFTRLVDLARDDRVLMRTLDLDFSFRKPGNGHGGHQRVVNQPDTT

SEQ ID NO: 368283 - protein, 56 aa, Zea mays
  Clone ID: MRT4577_99045C.1.pep
SSFDCRLITVERSVVGRLEAIREITVGFVHLLQYECIEKDRSAGDIILSGVGIHIG

SEQ ID NO: 368284 - protein, 76 aa, Zea mays
  unsure (1)..(76): unsure at all Xaa locations
  Clone ID: MRT4577_99046C.1.pep
QELLERGDLHDLVLHGLVAVDREGYRPLLLARGLAATHNDPHEHQAEGRSDGERCGVDEXRXGNXXEEXGDRVGDR

SEQ ID NO: 368285 - protein, 158 aa, Zea mays
  unsure (1)..(158): unsure at all Xaa locations
  Clone ID: MRT4577_99047C.1.pep
MMVCLDLLSGCELLWHSCTCSELXTLSWWKVQEKCITLGPVGVXIAANPSAEGEEDNRVADSAATEADIAESFRLEEQPPFATISCGIYIMKDIKMLTAELHAHTADGLKNGASAATMYLLNMLXDLQVLVVGSMNDDALAVLRYXYKDRPTLILCLL

SEQ ID NO: 368286 - protein, 117 aa, Zea mays
  Clone ID: MRT4577_99048C.1.pep
TRQIVILQFIYMPDLINTVSTLLLRLPFSRRMEIEADHIGLLLLASAGYDPRVAPSVYEKLGKIGGDSALNNYLSTHPSSKKRAQLLSQASVMNEALKLYREVSREVSAGQGTEGFL

SEQ ID NO: 368287 - protein, 111 aa, Zea mays
  Clone ID: MRT4577_99049C.1.pep
PFSTASTAWIIHGHRRSEQPVPPLLNTEAFDLYIRQNPVPNAYTLAINDKKPFIVVHTSLVELLTPRELQAVLAHELGHLKCDHGVWLTFANILTMGAYTVPGFGMVAGFL

SEQ ID NO: 368288 - protein, 45 aa, Zea mays
  Clone ID: MRT4577_9904C.1.pep
MINAMHIKDGKATYVSRYVKTARLKQEEYFGGAKFMKVKILSLKT

SEQ ID NO: 368289 - protein, 126 aa, Zea mays
  Clone ID: MRT4577_99050C.1.pep
INTNFIAILFFNKHFNFSKNERNQKETSGLLLSLHLGDNLAEQFFLPFHQHLQLQQINPSTLLANPVHYYPDDYAHHILDHHPLLPSLRQHGLFLSDQPNPVYLISICSGSFNQLLKLTCRMFFFI

SEQ ID NO: 368290 - protein, 370 aa, Zea mays
  unsure (1)..(370): unsure at all Xaa locations
  Clone ID: MRT4577_99051C.1.pep
MAASPACAPGLISGPTLPPLPVAFRCYWAQKPSSASTSSRRPCRRRFVPVAAASTRTSSAAARGLDADDFRHPLDKQNTLLLRAIPGLNDVGKALLGPVSEQVMVLQNIGTSVLVSPNQLPDLHQLLVEAAKLLNTEAPDLYIRQNPVPNAYTLAINGKKPFIVVHTSLVELLTPRELQAVLAHELGHLKCDHGVWLTFANILTMGAYTVPGFGMVAGFLEEQLYRWLRAAELTCDRAALLVVQDPKVVISVLMKLAGGCPSLADKLNVDAFLEQARSYDKAASNPVGWYIRXNCYHLNHDSRYYCCGNAYVFVLYDISFSISLHVXNAQTRELSHPLPVMRAREIDEWSRSQEYKTVMQKMFQMGLNRV

SEQ ID NO: 368291 - protein, 89 aa, Zea mays
  Clone ID: MRT4577_99052C.1.pep
PTRPPTRPKKKKKKKKKKKKKKKKGKGGLEVPGLHSRAGAGVAVIFFYRALIYWPWSCFFPTVITLTVPILISLWVGPPFAFSRFSDKA

SEQ ID NO: 368292 - protein, 202 aa, Zea mays
  unsure (1)..(202): unsure at all Xaa locations
  Clone ID: MRT4577_99053C.1.pep
AACLALLSVRGAWRLRRLVLRGSSPAPPSLPCPLPSAATGPKSPPPRRPPPGARAAGGSFPLQLPPPAPPLXARGLDADDFRHPLDKQNTLLLRAIPGLNDVGKALLGRXTLFLSVASPSQRSILNDSFLPSFATAGPVSEQVMVLQNIGTSVLVSPNQLPDLHQLLVEAAKLLNTEAPDLYIRQNPVPNAYTLAINGKKPF

SEQ ID NO: 368293 - protein, 226 aa, Zea mays
  Clone ID: MRT4577_99054C.1.pep
MGIVAASSPPRRGRYMNGRTQDDHYQDLKGLDPTLLNTEAFDLYIRQNPVPNAYTLAINDKKPFVRVHTSLVELLTPRELQAVLAHELGHLKCDHGVWLTFANILTMGAYTVPGFGMVAGFLEEQLYRWLRAAELTCDRAALLVVQDPKILLQPRDGGGLRAGSVAQGVPREGACGDLQVSMTLNILAYLSPLLTWDTKQVFVFVAAECETPQDAFIQLCSNTEVV

SEQ ID NO: 368294 - protein, 70 aa, Zea mays
  Clone ID: MRT4577_99055C.1.pep
GHHLNISELATQMIVMQVYFLKIHQNIHTSSHVPVTCSVVCCHHNISELDTEMVAKRVCFLKRNTPEHTY

SEQ ID NO: 368295 - protein, 111 aa, Zea mays
  unsure (1)..(111): unsure at all Xaa locations
  Clone ID: MRT4577_99056C.1.pep
KIEFTSPRAYQARLQLNRLIXPVSXAYNARWSXYSPPNSQIGGGWSTHSPXAYSXLGGXXAVXXKFXKLVKAGRPGXPSVIVLGGRHXVPRATALGTGGXKXPQNAWVETG

SEQ ID NO: 368296 - protein, 32 aa, Zea mays
  Clone ID: MRT4577_99057C.1.pep
NPASSPHPSPKSLTKMRKPLYKGCKVPTLSAD

SEQ ID NO: 368297 - protein, 135 aa, Zea mays
  Clone ID: MRT4577_99058C.1.pep
ASDSKSRFTHYCLVCLCKYGFRKSSGNCYRRSAPAHPKLAVSFPFNEAPVKLHLGRIVINGYIYDRDRASYTGTVEGIRPQTVAIGSRLQSSAQGYADRCHITLSTDRIDDWSFYGSYQVTNYPHESSTVDDGLA

SEQ ID NO: 368298 - protein, 124 aa, Zea mays
  Clone ID: MRT4577_99059C.1.pep
VGQQLRFPDCPGTSNASRDLIRGLLAKEPQSRLGVKRGAAEIKQHPFFEGVNWALIRCSTPPGVPRAVEPVAVAPPAPNKPAPVERVEINSSSSSKRMEINSSSKRMAGTGSESGGKFLDFEFF

SEQ ID NO: 368299 - protein, 43 aa, Zea mays
  Clone ID: MRT4577_9905C.1.pep
RASYQYRANGHPSLPVCVEENHRLYSTYQRSLCTRQRHEQLDQ

SEQ ID NO: 368300 - protein, 93 aa, Zea mays
  Clone ID: MRT4577_99060C.1.pep
FKILFFFFFFFFFFFFFFFFFFFLASNSQPMFKRAPTTYNKPGFLNLGQNHGTYYFFLTTQPPFFISPLSLKGKNRPWLPFLLKTWGGGTPTP

SEQ ID NO: 368301 - protein, 216 aa, Zea mays
  unsure (1)..(216): unsure at all Xaa locations
  Clone ID: MRT4577_99061C.1.pep
KYPVPVFDQLMDELSHSSWFSKLDLXAGYHQIFCKXGEEYKPAFQTHMGRYEFRVMAFGLTGAPNTFLEAMNETLKPVFRRCALVFFDDILIYSKSFEEHLLHLSEVLQLLLQDHWKVKLTKCDFAKQQISYLGHVISVEGVSTDPEKVXAVEQWPTPTNAKQLRSFLGLAGFYRKFVKHFGIISRPLFNLLKKNXIFVWTLDHQQAFNSLKIALI

SEQ ID NO: 368302 - protein, 48 aa, Zea mays
  Clone ID: MRT4577_99062C.1.pep
SGSIVCLIWWVYYYVYFMCLMVEVFWESLCLRRWRKIVGGGGGFCLVW

SEQ ID NO: 368303 - protein, 47 aa, Zea mays
  Clone ID: MRT4577_99063C.1.pep
KIQVRRLNKEIHMLGQQQPNGSYNVKIGVLFNNNRCANIFEALIRTL

SEQ ID NO: 368304 - protein, 57 aa, Zea mays
  Clone ID: MRT4577_99064C.1.pep
ACISRTRRIGKGFLIQVEWFKQPCGSINIFLLFLAKCQGRLTPFTVLLRPRICVDQR

SEQ ID NO: 368305 - protein, 78 aa, Zea mays
  unsure (1)..(78): unsure at all Xaa locations
  Clone ID: MRT4577_99065C.1.pep
PKNKGGALVQGEIFQKNSAPWEPLPNFWGPLWRVAPPPPPRGPFSMGIPKNSGRKLLAKKFFPAKXIPGVDSPPFVQE

SEQ ID NO: 368306 - protein, 130 aa, Zea mays
  unsure (1)..(130): unsure at all Xaa locations
  Clone ID: MRT4577_99066C.1.pep
NASPAVGATGFCIEGPLSLASAVLVSAVHSFXAVYSTPCFEHSGPFKXGAPIQASFVQGLAVFAGVSDVSAARVTLLNLRSHRMPSMVRSFIACXHAIMXTLPXALLMSKWMGSSHQDQHAVGLSGSGFS

SEQ ID NO: 368307 - protein, 188 aa, Zea mays
  Clone ID: MRT4577_99067C.1.pep
MYLCMIAKKGVKLASRVMDSAALRLDKQDEICSCTTKQTLAMYVSIFVKLAKDAHDKKFNDESVLSLLGAFRGVAAVGHIMLQDAMANGNYVGYSYRLVLDVDYTWCEFGQNMNNLEEKFKAVSKSTKAYEILRSTMTDAMILTVFFISAVVARHERLLRYVPGTKGRRTINPSDDGEPGASGTALQE

SEQ ID NO: 368308 - protein, 48 aa, Zea mays
  Clone ID: MRT4577_99068C.1.pep
VSVSVIPHPPNVDSPITSSFFPPRLSYRLDCCNDGCSDSMVGHNEEAS

SEQ ID NO: 368309 - protein, 48 aa, Zea mays
  Clone ID: MRT4577_99069C.1.pep
VLCIPVRPFNLCFSLYSPTAIDPGVDFHFLEGLFWSISPGVCHLPPHV

SEQ ID NO: 368310 - protein, 45 aa, Zea mays
  Clone ID: MRT4577_9906C.1.pep
GSSGRLFKISHSARQFLLYRPGPVVCMPCAPFWTVHSPSLVCCCQ

SEQ ID NO: 368311 - protein, 297 aa, Zea mays
  unsure (1)..(297): unsure at all Xaa locations
  Clone ID: MRT4577_99070C.1.pep
FGTRVHHASSHPPAPDXLLFLVAPLAAPQPAPGSAAAPQEDDLRCLRGVKHDLADPNERLADWDFKNTSGGAVCNYNGIGCWNLQESRVLSLSLSGFGLVGSIPSSLQYCRAATTLDLSSNALVGTILPALCDWLPFLVTLDLSSNQLNGPIPAELANCRFLNSLRLSGNQLSGQIPASLARLDRLKSLDLSGNKLDGQIPSQLGDNFPMDSFSGNSGLCGRPVSSRCGRGLGSTGLGIVIAAGVFGAAASLLLAYFFWRCTGKGKGGRRRHRRGTSESGGGEDGSWWTERLRAAHN

SEQ ID NO: 368312 - protein, 61 aa, Zea mays
  Clone ID: MRT4577_99071C.1.pep
GQQLSVSAPCRNCQLQNTRLQNPKVTGDHLTVLPRLGNPSPRGGANPSPGRCKHSLKTLGF

SEQ ID NO: 368313 - protein, 69 aa, Zea mays
  unsure (1)..(69): unsure at all Xaa locations
  Clone ID: MRT4577_99072C.1.pep
GGDHPCLVGGLAWVTADQSVDNAFXTYGEVLESKSIXXRETHRSXGIRLVTXXTEEAMRNTIEGMNGQG

SEQ ID NO: 368314 - protein, 44 aa, Zea mays
  Clone ID: MRT4577_99073C.1.pep
GRCISSGWWQKIDAPCAALVSRSRISCVCSTGQSVAFFFSGSVG

SEQ ID NO: 368315 - protein, 55 aa, Zea mays
  unsure (1)..(55): unsure at all Xaa locations
  Clone ID: MRT4577_99074C.1.pep
NYRTLYKYYPTEINLNVHTXPCVEXXTLSSKQNXYISFXXXNHXXTNXLXXIFSS

SEQ ID NO: 368316 - protein, 71 aa, Zea mays
  Clone ID: MRT4577_99075C.1.pep
VHEYAYALLLYLSTIYLAYPVVLVVVVVVEGMYGVVGYSVIRRDLWYKKSTQSTPCDVVEAKAGKKLIKSS

SEQ ID NO: 368317 - protein, 74 aa, Zea mays
  Clone ID: MRT4577_99076C.1.pep
ESMYTSRCCSISSSWRRMKPYKMSTSGKRSFSKQNLALTTSHPFWVLDPSDRSGRSPHKFMLQSDVSGDPQAVS

SEQ ID NO: 368318 - protein, 96 aa, Zea mays
  Clone ID: MRT4577_99077C.1.pep
LYLGVSHEHHRPRQDIPGRHTVEQLNKSFHADGIRMLPLLPLKRDHWVCTSAHPTNMAYVESVILNSLIIYNCRGTTHVDAYYMCLVLVPLNRSHV

SEQ ID NO: 368319 - protein, 130 aa, Zea mays
  Clone ID: MRT4577_99078C.1.pep
KKIPLGIIRETRTETIFGMGPLGKEGPPPTKEGRPPHKDGGMRAPKLRGPQKIGPRAPPPKRTKMVCPGFSKPGKQAGSPPNNQKQGFFLSSGGPPKNVGQKNVVFLPPPKKKKKKKKKKKKKKKKKKKP

SEQ ID NO: 368320 - protein, 54 aa, Zea mays
  Clone ID: MRT4577_99079C.1.pep
LSAAHGALTTDATLASSPPLRRRRGACYRLKRLRTLPRLLPIRQNQPTNKQATP

SEQ ID NO: 368321 - protein, 102 aa, Zea mays
  Clone ID: MRT4577_9907C.1.pep
RRPQHGPRRCYSSSCAAITTHLARASRMCFQSFTQELGDDCQKQEKYKDAEPSGIDLLKEMHCNKKKGFSENVEKAIVDMEEMVVTFSSRWTTTKISYRSCL

SEQ ID NO: 368322 - protein, 123 aa, Zea mays
  Clone ID: MRT4577_99080C.1.pep
SHLMAESISELQKKERSLQEENKALQKELAERQKAVASRQQQVQWDQQTHAQAQTSSSSSSFMMRQDQQGLPPPHNICFPPLTMGDRGEELAAAAQQQPLPGQAQPQLRIAGLPPWMLSHLNA

SEQ ID NO: 368323 - protein, 104 aa, Zea mays
  Clone ID: MRT4577_99081C.1.pep
MERVMKIASERAVVVFTLSSCCMCHTVTRLMADLGVNALVHELDSDPRGKDMERALLKMLGGRGPAVPAVFIGGKLVGGTNRVMSLHLAGELVPMLKSAGALWL

SEQ ID NO: 368324 - protein, 83 aa, Zea mays
  unsure (1)..(83): unsure at all Xaa locations
  Clone ID: MRT4577_99083C.1.pep
PFLPFFVLXPLWCSPPXLACSXXRLXASGXXFLWGCPPFVXSLXCLXXPSXXLPXWAXXCCFFCXLXFFPSXRVGXRVGXRVG

SEQ ID NO: 368325 - protein, 63 aa, Zea mays
  Clone ID: MRT4577_99084C.1.pep
LGVFINNRGVYNFLEINKTITPNLITPFQIGGIKFYNESCKPHNSRWILTHRNITRSEPLRAY

SEQ ID NO: 368326 - protein, 211 aa, Zea mays
  Clone ID: MRT4577_99085C.1.pep
MATEQFVLFIFICCLSSQFADGYDPVDPNGNITINWDFPSIEPNVYAVKVSIHNYQLYRHIERPGWRLSWVWAGDEFISDVIGAETTERGNCTGRHGANGAPPHCCEKQPVMADLLPGAPYNRQSANCCRGGVLSSVTQNNRTATSQFDMYIVNFALDEHGDPKMPTTFSIGVPGYTCSNATNVPATRSQVDEQRHVPVLRTWQIICSYSQ

SEQ ID NO: 368327 - protein, 632 aa, Zea mays
  unsure (1)..(632): unsure at all Xaa locations
  Clone ID: MRT4577_99086C.1.pep
EHRLQRLIDEADANPNDAAKQSALLHELNKLSPEDVIKRFEERSHAVDSRGAAEYLRALILTNTIADYLPDEQSGRSASLPALXQELKQRVSGNEDKPFMNPGISEKQPLHVVMVDPKSTGRSTRFAQEIFSTILFTIAVGVMWVMGAAALQKYIGSLGGIGASGAGSSSSYSPKEMNKDMMPEKNVKTFKDVKGCDDAKKELEEVVEYLKNPSKFTRLGGKLPKGILLTGAPGTGKTLLAKAIAGEAGVPFFYRAGSEFEEMFVGVGARRVRSLFQAAKKKAPCIVFIDEIDAVGSTRKQWEGHTKKTLHQLLVEMDGFVHNEGIIVMAATNLPDILDPALTRPGRFDRHIVVPSPDVRGRQEILELYLQDKPVANDVDINAIARSTPGFRGADLANLVNIAAIKAAVEGADKLNAVQLEFAKDRIIMGTERRSMFISDESRKLTAYHESGHAIVALNTQGAHPIHKATILPRGSALGMVTQLPSQDETSISKKQLLARLDVCMGGRVAEELIFGEDNVTTGARNDLHTATELAQYMVSNCGMSDAIGPVHVKERPSIEMQSRIDAEVVKLLREAYGRVKRLLRKHEKQLHALANALLERETLTADEINKVVHPYQEEPHLSFQDEEFALA

SEQ ID NO: 368328 - protein, 213 aa, Zea mays
  unsure (1)..(213): unsure at all Xaa locations
  Clone ID: MRT4577_99087C.1.pep
SFRLYRDICILTSLCLFLLDLANLVNIAAIKAAVEGADKLNAVQLEFAKDRIIMGTERRSMFISDDXKELTASTMNGHAIVALNTXGAHPIHKATILPRGSALGMVTQLPSQDETSISKKQLLARLDVCMGGRVAEELIFGEDNVTTGARNDLHTATELAQYMVSNCGMSDAIGPVHVKERPSVEMQSRIDAEVLFHRPLKYTDNILAVLFHF

SEQ ID NO: 368329 - protein, 106 aa, Zea mays
  unsure (1)..(106): unsure at all Xaa locations
  Clone ID: MRT4577_99088C.1.pep
MMENAPNTKKTCCNNKECKNPPLHEATHNKKGEDLLAAQEKRRYDRKQSXYGGNTTAVFHKNDTTTKNIVLKLRRQSCKYYSQDVIKRCKHFNIGDDKKDEASSLF

SEQ ID NO: 368330 - protein, 89 aa, Zea mays
  Clone ID: MRT4577_99089C.1.pep
CQLGTFFLWASGLYIQFVGDGKKSLVVGSLALNQGFWLPNKFPEKRPGVPPYFPLFPLLRNPPVQKKFLKVVMGIFEPPWVTGWWLFGQ

SEQ ID NO: 368331 - protein, 92 aa, Zea mays
  unsure (1)..(92): unsure at all Xaa locations
  Clone ID: MRT4577_9908C.1.pep
MARTKQTFRKSTGGKAPRKQLATKAARKLAPXTGGVNXPHRYRPRTVALXEIRRYQNSMEFVIRKLLFQRLVXXIAQDFKTDLRFQSHARLA

SEQ ID NO: 368332 - protein, 91 aa, Zea mays
  unsure (1)..(91): unsure at all Xaa locations
  Clone ID: MRT4577_99090C.1.pep
FDKVNGFYFRGXRVWDATVRHLLSIGMAAADQVLLAGCSAGGLAVILHCDQFQAFSLGPTTPPPPVLPXTTTVKCLADAALFLDAIDVSGG

SEQ ID NO: 368333 - protein, 91 aa, Zea mays
  Clone ID: MRT4577_99091C.1.pep
AVTLLSYQLNSATHSHQRRVGIAGGEWPTFDQLALRAPLGENTVLLRGPKNAREAVRHFGKASGVPHSHTKPYVRSKGRKFEKARGRRNRR

SEQ ID NO: 368334 - protein, 270 aa, Zea mays
  unsure (1)..(270): unsure at all Xaa locations
  Clone ID: MRT4577_99092C.1.pep
GDLGGDDAATATAGLEDSHGVNKAERRLIPTSDPQRKAEPGPGAGAVVFPPRLRQLVFNSLFTHILVFNSLXHQRKKKPFEAKFFNKPLENYHYMAVIFGNHQATGLFAKCTSDPLGFDTSESAGTYGVGYSGDLAGHESNNASPTRDSGESLNPSGPIRDGGDSSTRSGARRKRGRMMMEDEDPLICTVTEAFKTLSDAIKQSAPQPRPIIPPNLWTMMKQIPVFEREHIAHYYGYLCENPALAYAFLEMGLDDQMVWVSRYIKTHLSD

SEQ ID NO: 368335 - protein, 613 aa, Zea mays
  Clone ID: MRT4577_99093C.1.pep
MVAAGAAAAAPRLNPSPSPHRRRASSALSPAKSNANANTNAGDARPKPKAKVVSSRYLAPFSRSTSSSTSTSTSTTTTTSSSNSTSTSSSTPSRRFASPLPRRSVSVDRPRPAPAGNAAVGETGGPKAGTTTTTRSLSVAFQGRSFSFETSKAKPATSPSPSRRPVASAAGAITPERTRPTMGTVPERGKGFEGVHAHHRWPMSARLSQGFEGNPLTKSLDCSLHKRDAAVLAAVRSLRQSMVFEEGARRSSFDSGDYLMSSDTESVSSGSNSGSQDAGIGISHRARPSPKGMSVPARFLQDAAVSRSQRFTDPGTPYLAYTSGLAASPRTAPVKKSLQNGFVSSPLNRSVRQSSPSKLTGNPSRRVSSPSRSRNCVGSGTSSWDHQGRNSSGSGYALNGEVRRRWHGGSKVDCEHLLRILSNRHLQWRCVNAQAEAALSAQKMTAEKYLSDAWITTLGMRKSVALKRFQLQLYRNNWKLMTVLKGQMGYLEEWSLLERDYVDSLSVTVDALTASILCLPVTDGAKADIQDVKNAVGSAVDIMQTIGSSICSLLAKLAGTSILVSDLSKVATQERTLMEQSRELLSTLATMHIKYCYLEGQREQATDRSSMHP

SEQ ID NO: 368336 - protein, 192 aa, Zea mays
  unsure (1)..(192): unsure at all Xaa locations
  Clone ID: MRT4577_99094C.1.pep
PPPKGRRREKRPPKEGKKAGEPPPICIVPRGLIGGPGMGXPLRPRPPEAPFPRPFFKSLPPGPPSWGGXQKAPPPPPGGPSPRGPGPPRGGAQGPPFXGGPQACPQFPPPXGGAPPCGVPPLXGGPAGXGPPGLVPPGAPCFLWGPDPGFFYPRGGFFWGKKKKKKKKKKKKKKKKKKKKKKKKKKKKNQPP

SEQ ID NO: 368337 - protein, 48 aa, Zea mays
  Clone ID: MRT4577_99095C.1.pep
GACSWSIYGPSYFLFPPRQGSYNLRSLFLYRSLSTTLVLRRRQLLHVI

SEQ ID NO: 368338 - protein, 80 aa, Zea mays
  unsure (1)..(80): unsure at all Xaa locations
  Clone ID: MRT4577_99096C.1.pep
VQGVGSRTRDLLGRPFSKKVYIELTTYLSTYNCGYYDRDKVNGAHHRGMPHKFYHGRTGQXGDVTKRTIVVXEMNKHENV

SEQ ID NO: 368339 - protein, 72 aa, Zea mays
  Clone ID: MRT4577_99097C.1.pep
IWTRDHSLCARFSRGPICIYVYLAPRAYTGGPGSVWLAIKVLFLSIAYALGCWVVLAKPCVLFSSSPVAHCL

SEQ ID NO: 368340 - protein, 56 aa, Zea mays
  Clone ID: MRT4577_99098C.1.pep
IFIKSHFCPNLRKIRKALEINDQWMKLFFLVCLSEKEPRKNKRTSSPDQIQSEMFI

SEQ ID NO: 368341 - protein, 50 aa, Zea mays
  Clone ID: MRT4577_99099C.1.pep
ECPDDIGDIVACRVYHLGDLQGLPNPGLTSLQHRLSLENIRPWELGLAPT

SEQ ID NO: 368342 - protein, 126 aa, Zea mays
  unsure (1)..(126): unsure at all Xaa locations
  Clone ID: MRT4577_9909C.1.pep
VLLLELLTGRTPFQDLMELHGDDIPSWVRXVREXKRETESVSAGGGGAEEKLTALINIAATCVAADPARRPTTAELLRMVREARAEAMSSSNSSDRSPARWSDAMLGVPLPRDQAAESFTDRERLD

SEQ ID NO: 368343 - protein, 49 aa, Zea mays
  unsure (1)..(49): unsure at all Xaa locations
  Clone ID: MRT4577_990C.1.pep
PDEAXPMGKYIRFYRDFVLVLNKGLPPDDRVKFCQLPVGEGVPLCPRVK

SEQ ID NO: 368344 - protein, 237 aa, Zea mays
  Clone ID: MRT4577_99100C.1.pep
METCSKSAAKGTDKLFPSNSILPPAGPAVSPSQDLVCSSSNNLPETDLIVSPSPLVSWRTGACMVGSGKQLFLLTPLPKSKARSSMCPKSSKAQLTTTASMDELNLPNLPVWKLTISDDSSPDLEQSVKGKEARAGVATPHPSKAKKSSSEDNLFSPFSFSIQKSRRAPLPTPCPKTALRGKQHVFSPISEGSSKDDILSAGPVEGDKPPSGGSDEMLSDEKDLASRYPDLYGFNQP

SEQ ID NO: 368345 - protein, 79 aa, Zea mays
  Clone ID: MRT4577_99101C.1.pep
FGPGSMFWLVNALSVIEVLPCSEFPQSRGGGRPSGFSLCGFPGSGAIGWSPVLLVYARIHHLFRREKLGIALQKAPVFS

SEQ ID NO: 368346 - protein, 48 aa, Zea mays
  Clone ID: MRT4577_99102C.1.pep
DGRKSRKHFRKETRQIYVGRCQGRCCSYALEQLNLGDRVIPVIFLIRF

SEQ ID NO: 368347 - protein, 80 aa, Zea mays
  Clone ID: MRT4577_99103C.1.pep
KKGLGLGPSLISFYWWLSPGSFIPFLSGFVPLFPVGRRVFFGVLFLEKKKRKKKKKKKKKKKKKKKKKKKKKIKKKKKKR

SEQ ID NO: 368348 - protein, 70 aa, Zea mays
  Clone ID: MRT4577_99104C.1.pep
ICCKRICMQAHPLIGTTPSRKMTDLWHDRELSCMSEFMPCCQSQTTAYASAYDSCCSIRYELSCRTKTAP

SEQ ID NO: 368349 - protein, 56 aa, Zea mays
  Clone ID: MRT4577_99105C.1.pep
LFLAQVSISVFPSLGLFCVPWAEQRLPGPFAVRSHHAPNATILAGRSHPSSGQPLS

SEQ ID NO: 368350 - protein, 85 aa, Zea mays
  unsure (1)..(85): unsure at all Xaa locations
  Clone ID: MRT4577_99106C.1.pep
RGLPHPNACPLCDQSDETIQHILISCVFAXREVWTSILSKFGLLPIAPLLDCTHFSNWWSQSIKSVGKDMRKGLNSLIILVVWQL

SEQ ID NO: 368351 - protein, 116 aa, Zea mays
  Clone ID: MRT4577_99107C.1.pep
HRAWTRSTLCSLLVISDHSWSTKHVCLIRLSLPTTPPPSSHSTSMTCATSPTSDSSTPTDLTSDLTDSTSEICAPHCHCASVNYILVHQTTTSSPTTDTTTSSPAETAAARSPPSR

SEQ ID NO: 368352 - protein, 73 aa, Zea mays
  Clone ID: MRT4577_99108C.1.pep
SQSSSRGSAFLLHAPSGATAGIKIRYVFNLCSTTARVTSLLHRAHILVSDALFARLYFSSNVRFFSRIISLLF

SEQ ID NO: 368353 - protein, 31 aa, Zea mays
  Clone ID: MRT4577_99109C.1.pep
GLFSARELVVLFEGSVASVGPPVARDAVPGN

SEQ ID NO: 368354 - protein, 216 aa, Zea mays
  Clone ID: MRT4577_9910C.1.pep
CMKIAEDVAAGLVHLHQWSIVHGNLKPSNVLLGPDFESCLTDYGLLPTLLPSNAELHSSSSLFYRAPEVRGAHATSLELFTPATDVYSFGVLLLELLTGRTPFQDLMELHGDDIPSWVRAVREEERETESVSAGGGGAEEKLTALINIAATCVAADPARRPTTAELLRMVREARAEAMSSSNSSDRSPARWSDAMLGVPLPRDQAAESFTDRERLD

SEQ ID NO: 368355 - protein, 35 aa, Zea mays
  Clone ID: MRT4577_99110C.1.pep
RVSERFHLDVDGVAHKNGKFCFIHLLLFGISTNPL

SEQ ID NO: 368356 - protein, 170 aa, Zea mays
  Clone ID: MRT4577_99111C.1.pep
MADREHRTVFVTVGTTCFDALVMAVDSPEVKKALLQKGYSNLLIQMGRGTYVPLKVSGDATLQVDHFTFSPSIADNMRTASLVISHAGSIFETLRLGKPLIVVVNEDLMDNHQSELAEELAERKHLFCARPQTLGETIRAMDLETLVPYEPGDAKPVVTLINRFLGFPVD

SEQ ID NO: 368357 - protein, 216 aa, Zea mays
  Clone ID: MRT4577_99112C.1.pep
MLSVDGVEELSDLHNDDEELPESPTAGRGDRVEASEADGVDSASDSGSDRVYTIDKVHQGESAPIARVMDKYQGEAVEPDIKKLYMRLEALEADRESMRQALVAMRTEKAQLVLLCEIAQHLAKDGVPAGVGPGVHRSPRKRAVGIVERRFTEDKRVPLLKTYSVVALFKWVLTLFGKKKKLSQSRYTFGLSSNNVGLLLLLDKCPRIQKTLMRTK

SEQ ID NO: 368358 - protein, 172 aa, Zea mays
  Clone ID: MRT4577_99113C.1.pep
MADREHRTVFVTVGTTCFDALVMAVDSPEVKKALLQKGYSNLLIQMGRGTYVPLKVSGDATLQVDHFTFSPSIADNMRTASLVISHAGSGSIFETLRLGKPLIVVVNEDLMDNHQSELAEELAERKHLFCARPQTLGETIRAMDLETLVPYEPGDAKPVVTLINRFLGFPVD

SEQ ID NO: 368359 - protein, 90 aa, Zea mays
  Clone ID: MRT4577_99114C.1.pep
MADREHLTVFVTVGTTCFDALVMAVDSPEVKKALLQKGYSNLLIQMGRGTYVPLKVSGDATLQVDHFTFSPSIADNMRTASLVISHAGVL

SEQ ID NO: 368360 - protein, 177 aa, Zea mays
  Clone ID: MRT4577_99115C.1.pep
RKFQVQTEILKFFAVQGLFSASLGTEVTSFELQEKFKWPKAAISTSLRNECIEQLQLLLEDAQKDEALHVSGVKSNDLGFYFMRFINTVCNIPSVSLFRTLSSNDDNAFKKTLATESALFQEERKIGTGLDSTKMHVIRYLLIQLLLQVLLHPEEFWEAAIDVIICCKKTFSFHCSE

SEQ ID NO: 368361 - protein, 71 aa, Zea mays
  Clone ID: MRT4577_99116C.1.pep
PMSLPCPASRPASPRQRASPNLSALRGRSRLEEDASGQVVALTAPKVPPLRGGGRDAARPRHAGSCGGGGG

SEQ ID NO: 368362 - protein, 121 aa, Zea mays
  Clone ID: MRT4577_99117C.1.pep
SGATCHEPADHVARLKPPPHRPQTTVVVSLYKLNVSPSAPSLCSPEQTLPFTRSSTVSANHQNSLNLLTAIAVEPPQPESVSSHSSRVLAPSSCTDAPRLDRFSCPDEDATVHRFAAGVHC

SEQ ID NO: 368363 - protein, 73 aa, Zea mays
  Clone ID: MRT4577_99118C.1.pep
LFCSTHADAEGEKLKNLCKIAQLVSYKAWVESCFSDSQIRISLTSPPLWKNDAFQGKFLGIYGQTALALKIQC

SEQ ID NO: 368364 - protein, 218 aa, Zea mays
  Clone ID: MRT4577_99119C.1.pep
MAGTEAFEAYFRRADLDQDGRISGQEAVAFFQGANLPQQVLAQVWMHADRNKTGFLGRPEFFNALRLVTVAQSGRQLTPDIVQSALYGPAAARIPAPKIAAGAVPPQMGAAGAPRPQGSAAMTPTPGQVGAAQMNPAATPRPQGSGMVPTSTQVSVPQVNPGAAPRPQGINSMMPAASQGGALQATQFAAPRAMQPQPPNLGITQQQPSSTGFMRPPQ

SEQ ID NO: 368365 - protein, 51 aa, Zea mays
  Clone ID: MRT4577_9911C.1.pep
HKQITPPVLTERVRSNGSQARRAIKDLMARGLIRMISGQSSQPPPPRAGNT

SEQ ID NO: 368366 - protein, 121 aa, Zea mays
  Clone ID: MRT4577_99120C.1.pep
SGATCHEPADHVARLKPPPHRPQTTVVVSLYKLNVSPSAPPLCAPEQTLPFTRSSTVSANHQNSLKLLTAIAVEPPQPESVSSHSSRVLAPSSCTDAPRLDRFSSTVASSSGHRFAAGVHC

SEQ ID NO: 368367 - protein, 77 aa, Zea mays
  Clone ID: MRT4577_99121C.1.pep
ELIVKNARQLICRHEATENWVPRCQLLFCRTILFLWSTHVTPEFKDKSRCILHMCQDQVSHTCDDLVYRKQCHIFIT

SEQ ID NO: 368368 - protein, 52 aa, Zea mays
  Clone ID: MRT4577_99122C.1.pep
NMGKPKPQMNSQNTAEPERPFYQKHTGATTNPTRTKKYPLDQGKHPKPKQNN

SEQ ID NO: 368369 - protein, 131 aa, Zea mays
  Clone ID: MRT4577_99123C.1.pep
DLTSLRAPFLFFFFFGGFFFFFFSQKPQTKRVLSITPGEEFKGPPKFFVSLAMRRITFFRDPKRFGVTIYWTVAQKKRQANSWLLKIIGAIARVLKNPKEKTFGGPWSIEPELFKGKKVNFFSYFSYSTTH

SEQ ID NO: 368370 - protein, 91 aa, Zea mays
  Clone ID: MRT4577_99124C.1.pep
LKKGSPSKLKGSCWRLLPNVPPACQSFLISFTQNNTNWWSPFLCKQKLAFLISLNRLCGCLFDAHKQLPDFDGIGTPFYSRPKPEGCTACT

SEQ ID NO: 368371 - protein, 56 aa, Zea mays
  Clone ID: MRT4577_99125C.1.pep
VVGGAAGSFLILISILLNQPASFAMLLPFQIIYHFSFCPKSFLKKLLLSYKKIHHL

SEQ ID NO: 368372 - protein, 198 aa, Zea mays
  unsure (1)..(198): unsure at all Xaa locations
  Clone ID: MRT4577_99126C.1.pep
RPGLSFSRRSSIHTRRNRRARARHGAASEKKSNGLSTYTVDETLVSMTLXKLPACAAAYSGYGYXSEPTETTLLSFAATSAHTDRPLSAHEESLITSVAFARMLVRPYAXRILSNNYGRRAEINFTDIVTVGDDLHIAFAPNYLSLIELRFMLXLDCDGXPVIRSCCLKFIPAPNRGTWMVMLSTLWTAGTIMQASLA

SEQ ID NO: 368373 - protein, 323 aa, Zea mays
  Clone ID: MRT4577_99127C.1.pep
MELGAVEEAKQILTREFDAEKAEILKELDDLEKKLEELQTNKGLLEAENDKLQLEVLTAQHKQSMSEAEAESLKMELGALVEAKEAATKAFGAEKAKTTKELEDLKRKVEEIQTKKDLVEGEKDKLRLEILIAEQRHAMAELEVKRLKMDLAASAEARETVVRSCDAEKAKFMAEIENLRRKIEEIHASKEAAEKAARNKDAEADRLKDELARIRLSVSQLQASCDELDAKQSRLNDEKNSVQKALVSEKVEGNKLKLKIEELENHIAGKDGEKGKLKAALEEKMTEINALSKDNAMLHRTILEAQEKNKGSILSFLSPCGSK

SEQ ID NO: 368374 - protein, 161 aa, Zea mays
  unsure (1)..(161): unsure at all Xaa locations
  Clone ID: MRT4577_99128C.1.pep
MKTRPCTATTKTTGAPCHEPAKHHEYNGGVCANNHAVXQPPFSRMIXARGNPSYQDEEGSGTXSNTKLTPDSDPCSRTPGRVRITDLRLDATCQLHPVHFDLNATLCDAMAKASQGEMIRNAGRLQVQHTRVARNWNGLYIAFRVDAGSNDNYLCMDIEHE

SEQ ID NO: 368375 - protein, 217 aa, Zea mays
  Clone ID: MRT4577_99129C.1.pep
MMLLMWPTSESTAATPQHQIPPISSPPPPSLLSKIAMASEKKQSNPMREIKVQKLVLNISVGESGDRLTRAAKVLEQLSGQSPVFSKARYTVRSFGIRRNEKIACYVTVRGEKAMQLLESGLKVKEYELLRRNFSDTGCFGFGIQEHIDLGIKYDPSTGIYGMDFYVVLERAGYRVARRRRCKSRVGIQHRVTKEDAMKWFQVKYEGVILNKAQNTS

SEQ ID NO: 368376 - protein, 116 aa, Zea mays
  unsure (1)..(116): unsure at all Xaa locations
  Clone ID: MRT4577_9912C.1.pep
FAQEPRAGPGVPQPRTKTPPXQTYIRAPGGPQRAGMPXPPGCSISPGEETLPAPGDPPGAGVXCPPRPWARPPQNPGPPGDHGGGGGWPPPVPPFXPPRTFPXXPAVGPPPPGGPN

SEQ ID NO: 368377 - protein, 147 aa, Zea mays
  unsure (1)..(147): unsure at all Xaa locations
  Clone ID: MRT4577_99130C.1.pep
GIKPPGLAEGSGNQEQPQVAQFKAGVRXLTKVDPAGHLQIILFKPVAVGKGTKDLQPQVVEPNGPSLNXPSGAKPCGYLQQVVPINQPGGAKFGGDPQQGPQVIKPMAGGNPLGGTFPEQPPPMVPNHPVPFKDPALQPPNGGGAIF

SEQ ID NO: 368378 - protein, 137 aa, Zea mays
  unsure (1)..(137): unsure at all Xaa locations
  Clone ID: MRT4577_99131C.1.pep
MAPKAAPAKKGDAKTQEXKTEKIRXTSVTFHRPTTLKKARDPKYPRISTTGRNKLDQNQILKHPLTTESVMNKIEDNNTLVFIVDLKVDKKKIWAAVKNMYDIQTKKVITLIRSDANKKAYVKLTPDYDALDVVNKI

SEQ ID NO: 368379 - protein, 141 aa, Zea mays
  unsure (1)..(141): unsure at all Xaa locations
  Clone ID: MRT4577_99132C.1.pep
KYMACCLMYRGNVAPKDVNAAVATIKTNRTIQFVGWCPTGFKCGINYQPPRVGPGADLAKVQRPVCMIPNSTSVVEVFPRMDHKFDFMYAKRALVRWXVGEGMKEGXFFEARKDLAALKKGYEGVGVGFNEGEDGDEGDEY

SEQ ID NO: 368380 - protein, 152 aa, Zea mays
  Clone ID: MRT4577_99133C.1.pep
MAPKAAPAKKGDAKAQALKVAKAVKSGAGKKKTKKIRTSVTFHQPKTLKKARDPKYPRISTTGRNKLDQYQILKYPLTTESAMKKIEDNNTLVFIVDLKADKKKIKAAVKKMYDIQAKKVNTLIRPDGKKKAYVKLTPDYDALDVANKIGII

SEQ ID NO: 368381 - protein, 152 aa, Zea mays; identical to SEQ ID NO: 368380
  Clone ID: MRT4577_99134C.1.pep

SEQ ID NO: 368382 - protein, 152 aa, Zea mays; identical to SEQ ID NO: 368380
  Clone ID: MRT4577_99135C.1.pep

SEQ ID NO: 368383 - protein, 158 aa, Zea mays
  unsure (1)..(158): unsure at all Xaa locations
  Clone ID: MRT4577_99136C.1.pep
MRHLRAEMAPKAAPAKXGDAKTQALKVAKXVKSGAAKKTKKIGXFVTFHRPTTLKKARDPKYPRISTTGRNKLDQYQILKYPLTTESAMKKIEDNNTLVFIVDLKADKKKIKAAVKKMYDIQAKKVNTLIRPDGKKKAYVKLTPDYDALDVANKIGII

SEQ ID NO: 368384 - protein, 127 aa, Zea mays
  unsure (1)..(127): unsure at all Xaa locations
  Clone ID: MRT4577_99137C.1.pep
TDASADAYADQWALSRFIPDRLTRTRITFSYALCFNGGSHIFSDGRLDDLGNTSIIDAESILAILACQIMVMGDFDGDRIACGQLGEVVNSLXPGSSIHALGLSNDPKAFAKLKVIELSNGRLAMFS

SEQ ID NO: 368385 - protein, 152 aa, Zea mays
  unsure (1)..(152): unsure at all Xaa locations
  Clone ID: MRT4577_99138C.1.pep
MAPKAAPAKKGDAKTQALKVAKAVKSGAAKKKTKKIRTSVTFHRPTTLKKARDPKYPRISTTGRNKLDQXQILKYPLTTESAMKKIEDNNTLVFIVDLKADKKKIKAAVKKMYDIQAKKVNXLIRPDGKKKAYVKLTPDYDALDVANKIGII

SEQ ID NO: 368386 - protein, 152 aa, Zea mays; identical to SEQ ID NO: 368380
  Clone ID: MRT4577_99139C.1.pep

SEQ ID NO: 368387 - protein, 79 aa, Zea mays
  Clone ID: MRT4577_9913C.1.pep
DEKCLRDANMDNITDHDVVLVGGSTRIPSVHQLLQDFFNGKELCKNINPDEAVAYGAAVHADILSGEGNEKVHELLLLT

SEQ ID NO: 368388 - protein, 89 aa, Zea mays
  Clone ID: MRT4577_99140C.1.pep
DSQTRARHACVTRAACNRQPPFFLPPPPSSYIRLVSALAPPQSPDRGRRRLRGNKLVPSIARSIDLATSAALHLTGTPLINGCCVDGGS

SEQ ID NO: 368389 - protein, 208 aa, Zea mays
  unsure (1)..(208): unsure at all Xaa locations
  Clone ID: MRT4577_99141C.1.pep
MASEKKQSNPMREIKVQKLVLNISVGESGDRLTRAAKVLEQLSGQSPVFSKARYTVRSFGIRRNEKIACYVTVRGEKAMQLLESGLKVKEYELLRRNFSDTGCFGFGIQEHIDLGIKSCRVCLLSCELMTNMPFINLNCHXYDPSTGIYGMDFYVVLERAGYRVARRRRCKSCVGIQHRLTPEAPMPLFXVNVQGVLLQQGPIHILIP

SEQ ID NO: 368390 - protein, 146 aa, Zea mays
  Clone ID: MRT4577_99142C.1.pep
MARGPPGPGGRGRFGGGPLGDERPVRHGVRVEEKPYFPFPRRGLGLGVAPPSRPLWVGGLGPRVPGFDLLELFLRFGDVEGVAPEPGRNFAFVSFLREGDPVAPVRELQGARLAGGPVRIEFFQGGSVEHPLFLICLFNLAPSHYR

SEQ ID NO: 368391 - protein, 61 aa, Zea mays
  Clone ID: MRT4577_99143C.1.pep
CESSCLQQQPAPARHLLVLSGSQDLFRIFSFHHVTRSCLVASKSLRPPAQPAFRRRKRLPS

SEQ ID NO: 368392 - protein, 82 aa, Zea mays
  unsure (1)..(82): unsure at all Xaa locations
  Clone ID: MRT4577_99144C.1.pep
QTPQIQKGWILLCFDNPNHXXXNHXHLPLYTFNVPQTNTIFHSKQNTQSLSELSLSRMRSIYLHHIFIKISPTTIKNKIPKI

SEQ ID NO: 368393 - protein, 58 aa, Zea mays
  unsure (1)..(58): unsure at all Xaa locations
  Clone ID: MRT4577_99145C.1.pep
NKNTGPGTVKRRCPCTAHENRLQDLLKKAPLHQTHLQHRVGAVLXGGDTAPVDGKRPP

SEQ ID NO: 368394 - protein, 106 aa, Zea mays
  Clone ID: MRT4577_99146C.1.pep
EPQGPMEKGPQKKKYPGGAFDPLGFSQGPPQFWGFQLQGVQNGPPPLLAFVGFWVPPLGFPGPGPLENLPSPLPGPWAHNIGGIFFPRSISPLAPLHCWVLFPVGD

SEQ ID NO: 368395 - protein, 228 aa, Zea mays
  unsure (1)..(228): unsure at all Xaa locations
  Clone ID: MRT4577_99147C.1.pep
ATQHPSVCVAPPASPPWSVDREDDAGERGRRAQERRGVALGGVPGAREGRGAEERPVLEAXAACGGDDQQPPSMAAMPASLRAIQARRKQEAAQRGVPRATATSAAGCAVAALVKAVEAVQGAAAGGAAEAARGAGDAVAWVFSKVHLQSPDLAVGLLGMVACCLGTIVEAERCRVEARKPEAAPAGNAGADRPDGNGAPAEXDRDHDMPXXVEXDVENALWAQIGIL

SEQ ID NO: 368396 - protein, 93 aa, Zea mays
  unsure (1)..(93): unsure at all Xaa locations
  Clone ID: MRT4577_99148C.1.pep
MIEIEAVSKTMDGKEEDVRLGANKFSELQPILTAAHGAADDXDYKEPPSAPLFEPGELKSWSFYCAGIVEFVVIFLLLYITILTVMGVYKFTF

SEQ ID NO: 368397 - protein, 143 aa, Zea mays
  unsure (1)..(143): unsure at all Xaa locations
  Clone ID: MRT4577_99149C.1.pep
GPPRGGAALSVLRXAAXLXWAPVXALVVVVAALVGASCAGSXXVCWGLFGGGGSLAVACXSGLFSCVFFAFLSAFGGGLPPVLCLAGLCDPGSGRCSGPCCVFLACASLGLVVLLSVGGAXGGCGLSCFVFFSVWPASCGSSS

SEQ ID NO: 368398 - protein, 111 aa, Zea mays
  Clone ID: MRT4577_9914C.1.pep
LGLVNPPPPSSLSSCFGFGALGCLLLGRRRRRRKHVSGIRGVVVGGGGGRERVRDGRHGAGGPLAHGPTTPARVHRTQPSRTPTTGRRARLACDWLARSRHRSRSGEPLVH

SEQ ID NO: 368399 - protein, 39 aa, Zea mays
  Clone ID: MRT4577_99150C.1.pep
NTAQGISQLGSCSLIGTYPKGVHFTRGLSTSHYLNRLGS

SEQ ID NO: 368400 - protein, 62 aa, Zea mays
  Clone ID: MRT4577_99151C.1.pep
LHQFNPCAYVPCNYILRVNQVMPLAKRTSTCQMHALLAGSEISNSRPFCRAPPSGSKFIIFI

SEQ ID NO: 368401 - protein, 278 aa, Zea mays
  unsure (1)..(278): unsure at all Xaa locations
  Clone ID: MRT4577_99152C.1.pep
ARGVVGTDSATIALSGSESRDGGGRRAKLQGVVLGCTASYDGQSFQSSDGVLSLGNSNISFASRAAARFGGRFSYCLVDHLAPRNATSYLTFGPPGPEGGAAASSSSSAAAARTPLLLDRRMSPFYAVAVDAVHVAGEALDIPADVWDVARGGGAILDSGTSLTVLATPAYRAVVAALSERLAGLPRVAMDPFEYCYNWTAAAPXIPGLEVRFAGSARLQPPAKSYVVDAAPGVKCIGVQEGAWPGVSVIGNILQQDHLWEFDLRDRWLRFKHTRCAL

SEQ ID NO: 368402 - protein, 29 aa, Zea mays
  Clone ID: MRT4577_99153C.1.pep
VYSHKINVNQFLYHYLIYEHLFTLFYLLN

SEQ ID NO: 368403 - protein, 282 aa, Zea mays
  Clone ID: MRT4577_99154C.1.pep
HGRYKGGSAARGVVGTDAATIALSGSGSEDGSGGGGRRAKLQGVVLGCTATYDGQSFQSSDGVLSLGNSNISFASRAAARFGGRFSYCLVDHLAPRNASSYLTFGPGPEGGGAPAARTPLVLDRRVSPFYAVAVDAVYVAGEALDIPADVWDVGRGGGAILDSGTSLTVLATPAYRAVVAALGGRLAALPRVAMDPFEYCYNWTAGAPEIPKLEVSFAGSARLEPPAKSYVIDAAPGVKCIGVQEGAWPGVSVIGNILQQEHLWEFDLRDRWLRFKHTRCAL

SEQ ID NO: 368404 - protein, 118 aa, Zea mays
  Clone ID: MRT4577_99155C.1.pep
PLNPIARRNERPHAADPQEITGTARESIRDTSRRGRRPTRAAAARPYTSRQGRRPSRDADACAACCPAARGASRRCTPSASESEGILGEAKAKAKAKAEAAAGLVSGSRRAGEEHDDF

SEQ ID NO: 368405 - protein, 183 aa, Zea mays
  Clone ID: MRT4577_99156C.1.pep
MCTLFLHRLQTEHSIHIGGLVRLDVEELTVGSIYVTVWASPLVPLHMGKTENTTTLIKEHFGLQLQPPIGQERVKELGKWVRKQFKVSGNSWDTNSKDIAIAGLGWFGIGLKGEAVLGLWTYDGVDVISRSSLVHERASVFEEAGFTVSQIVSKADSMTNKLKSTKKPKKERMKRTSPTEPEA

SEQ ID NO: 368406 - protein, 52 aa, Zea mays
  Clone ID: MRT4577_99157C.1.pep
GVIQVYNEIQWQHCARKVGKKHTVNCSLIGMWFMEIFVSINVIYNLPDSIHV

SEQ ID NO: 368407 - protein, 274 aa, Zea mays
  unsure (1)..(274): unsure at all Xaa locations
  Clone ID: MRT4577_99158C.1.pep
GNCRTALFVSEHGGQSEIVLRVKQGNNPTFGFLMPDHHLHSYFRYIVDHPQLLKDGSDADTNKGNKIVMGESEIAASSSGALSLLGAVYESGDEDEGVLPASSKGKDPGNEALHDNAHKGSSFLVHDNEVKKDQTVTIEASTLVKDKPIFTKKNPTIAGNSIVAAQREKVKDATTVLTTSTKSDNSKLGVSDTKEMILEPPSILKGTMEKIVEFILRNGKEFEQKLIEQDRMTGRFPFLLPSNPYHSYYLKMLQETPESKXSRGGASEHRDRRS

SEQ ID NO: 368408 - protein, 101 aa, Zea mays
  Clone ID: MRT4577_99159C.1.pep
VNAGIVAMVHVENVQCRLLFFFSARLQVRGGGGCDLCSFLGGGTTCVFISGGETMMIAPSKGNWGLVHSVKLGCLTSLDWIYLLWQWVLGGPGVAGHELDP

SEQ ID NO: 368409 - protein, 142 aa, Zea mays
  Clone ID: MRT4577_9915C.1.pep
RAYLNREFLKRINSPASSPTLTHPTQNNALSNDQSSVTGANKGIGYEISQGPPQLPPSPTMYSWEVAPSKAATKRLQSFATSSPILPTRSSPSSSTSTQTAPSNPPSRRSSRPMAASTSSSTTPASLLIPIFCAAKSHSVRA

SEQ ID NO: 368410 - protein, 114 aa, Zea mays
  Clone ID: MRT4577_99160C.1.pep
YGVSAQTPSEGGALQSALVFGEIGRRLKDVGREVVKTVNAVFEWHITKNGNVAAKWTIDLKNGSGEVYQGPTTRTADTTIKISDEDFMEVVLGKLNPQNAFFTSRLKARGNIML

SEQ ID NO: 368411 - protein, 62 aa, Zea mays
  Clone ID: MRT4577_99161C.1.pep
PAPSAYASRSCSTIHAPCASVFYDTGFIISTPGRSRGALRARALGRSPLINELARRSLTGSA

SEQ ID NO: 368412 - protein, 76 aa, Zea mays
  unsure (1)..(76): unsure at all Xaa locations
  Clone ID: MRT4577_99162C.1.pep
GGGVFSFRQFCFGSWKDSTLVTCRGDFEPSPSPCNYACAFFFFLGHXIRFVGGGGPFDLIGGXLRGEGRPRTYRTC

SEQ ID NO: 368413 - protein, 55 aa, Zea mays
  unsure (1)..(55): unsure at all Xaa locations
  Clone ID: MRT4577_99163C.1.pep
MKTLVRPPTYPAQWYQICSIMSDRYVAGHIQLENVLHPLHSPLXQXGVSLTIAWL

SEQ ID NO: 368414 - protein, 995 aa, Zea mays
  unsure (1)..(995): unsure at all Xaa locations
  Clone ID: MRT4577_99164C.1.pep
MPSQVMDPRRHLSQFSNPTVAASSFSEEQFRLPTERQVGFWKQESLHHIGSKSVASSPIEKPQPIGTKTVGRVEPQPYKLRDQKTAFSLEHKTFGQERHVNLPPSLWRADQDPNLQSDPSLFPDGRRTSPNEAYNENGLFSSSLSEIFDRKLGLRSMDVRLRQPVQKVDLTHVDDEPFELTEEIEAQIIGNILPDDDDLLSDVLDVGYTAHANMGDDVDDDIFYTGGGMELAFPAFPILVLFCKVSRSVFIDFHDAGHRRLRLLQNFVPLFVLNAKGWVWVCAFXLLGQEWXEAQGVSTAFDRCGFVIIFYYHITAACNAVRVLQYKPLIRGKLDIHYSIPKDNPSEKDINQGMLVVFNVDPSITDNDIHQIFSEYGDIKGIRDAPQKGHHKIIEFYDVRAAEGAARALNRSDLAGKKIKLETGRLSGARRSTQHMSKELGQEEFGVCKLGSPSTNSPSLPSLGSSNIAAMTSCGRENGSMHGLHSGLLTSMSPFREASFLGLSSTLPQSLSSPIGIASAATHSNQAPLGELSHSLSRMNGHVNYGFQGLGAIHPHSLPDVHNGANNGTPYNLNTITPVGVNKNSRTAEAVDSRHLHKVGSGNLNGHSFDRAGEGAMGFSRSGSGHNCGHQLMWNNSNNFHGHPNSPVLWQNPGSFVNNVPSRPPAQMHGVPRAPSHMIENVLPMHHHHVGSAPAINPSLWDRRHGYAGDLTEASSFHPGSVGSMGFPGSPQLHGLELNSIFSHTGGSRMDPTVSSAQISAPSQQRGPMFHGRNPMVPLPSFDSPGERMRSRRNDSGVNQSDNKRQYELDVDRIMRGEDSRTTLMIKNIPNKYTSKMLLAAIDESHKGTYDFIYLPIDFKNKCNVGYAFINMTNPQHIIPFYQSFNGKKWEKFNSEKVASLAYARIQGKTALIAHFQNSSLMNEDKRCRPILFHSDGPNAGDQEPFPMGSNIRARSGRSRTSSGEENHHDIQTVLTNGDTSSNGADNSGPTKDTE

SEQ ID NO: 368415 - protein, 159 aa, Zea mays
  Clone ID: MRT4577_99165C.1.pep
GGFWAGFFCWPFLPGIGKRTSLVVGSGGFPPWFGLELASPACFLVFPFGVFHPHVGVGPMGAPLGAPSPLRLRGPGVFGMVSLPWFPQGGPPGPPPLSPLLVPVPSVFFPVFFCRFFWLLPRPQRPWPGPPHQPCLCSPPVFFCPCLSPWHFLLLWVGV

SEQ ID NO: 368416 - protein, 154 aa, Zea mays
  Clone ID: MRT4577_99166C.1.pep
MPSQVMDPRRHLSQFSNPTVAASSFSEEQFRLPTERQVGFWKQESLHHIGSKSVASSPIEKPQPIGTKTVGRVEPQPYKLRDQKTAFSLEHKTFGQERHVNLPPSLWRADQDPNLQSDPSLFPDGRRTSPNEGLHENGLFSSSLSEIFDRKLGL

SEQ ID NO: 368417 - protein, 166 aa, Zea mays
  unsure (1)..(166): unsure at all Xaa locations
  Clone ID: MRT4577_99167C.1.pep
GHGARAQSRKSRKPAQDRFSSAAGSHALVPXGGRARAGAAGQQKRAARAAHPRAQRRHEPPLPRPIGCGSGARVRMIRPIQRATLAAASSGTGISRNGKSTRLSLSLSLSLSLSLSLSLSLSRRPTRLCATPCELRLAGERGVLDGREGREAVEGRARRKSSLVPN

SEQ ID NO: 368418 - protein, 194 aa, Zea mays
  unsure (1)..(194): unsure at all Xaa locations
  Clone ID: MRT4577_99168C.1.pep
CTAKGHHKVIEFYDVRAAEGAVRALNRSDLAGKKINLGTVGLSGVRRLTQHMSKESGQEEFGVCKLGSLSTNSPPLPSLGMLLVFFIFNVCHVYSYIXTWRIILQGSSYMVAMTSSGRENGSIHGLHSGLLTSMSPFREASFPGLSSTIPQSLSSPIGIASATTHSNQAPLGELSHSLSRMNGHMNYGXQGLGA

SEQ ID NO: 368419 - protein, 79 aa, Zea mays
  Clone ID: MRT4577_99169C.1.pep
ASILTLLACFLIVSKCKEIPLPVCIITHKLFETLIEDVACSAPLNLDDVEWWENPPYYCVVCECTVVTTSELAVSDKNY

SEQ ID NO: 368420 - protein, 102 aa, Zea mays
  Clone ID: MRT4577_9916C.1.pep
IMLFVEYIISLTTLYSWDTRKAAQPTGRQITAYNNPDPAPNDHQYPDKNWNPWPTPNQGPKSPGETHRVNGKKNPNGANPKKPEKRQPPKTERDHPGPQQQN

SEQ ID NO: 368421 - protein, 42 aa, Zea mays
  Clone ID: MRT4577_99170C.1.pep
IERSWEVCYSRKRTGRPTCTSCPRSYLWTTRLEGPCFLRDQN

SEQ ID NO: 368422 - protein, 389 aa, Zea mays
  Clone ID: MRT4577_99171C.1.pep
MTACVPIFAAMGFSRSGSGHNCGHQLMWNNSNNFHGHPNSPVLWQNPGSFVNNVPSRPPAQMHGVPRAPSHMIENVLPMHHHHVGSAPAINPSLWDRRHGYAGDLTEASSFHPGSVGSMGFPGSPQLHGLELNSIFSHTGGSRMDPTVSSAQISAPSQQRGPMFHGRNPMVPLPSFDSPGERIRSMRNDSGANQSDNKRQYELDVDRIMRGVDSRTTLMIKNIPNKYTSKMLLAAIDESHKGTYDFIYLPIDFKNKCNVGYAFINMTNPQHIIPFYQTFNGKKWEKFNSEKVASLAYARIQGKTALIAHFQNSSLMNEDKRCRPILFHSDGPNAGDQEPFPMGSNIRARSGRSRTSSGEENHHDIQTVLTNGDTSSNGADNSGPTKDTE

SEQ ID NO: 368423 - protein, 96 aa, Zea mays
  Clone ID: MRT4577_99172C.1.pep
IMEGGGSNTPFYRGNSTALATNPSAAAAAAAANGAQKGDREAAIDAEIVRVNDLPAHSSYAIHRMKVLNKLRHLLSIKRTTSQDEELELLFASLSI

SEQ ID NO: 368424 - protein, 151 aa, Zea mays
  Clone ID: MRT4577_99173C.1.pep
VMIQTSNGISLHLETIRKHAMRGNDITVEIGVGLVPATMSWKNTLKVVNPLSSAAVAPDASAAEHSSRRRSVVVGPAFFFFLLYHIEVNKQYHGYLANNSCPRQQVHLWLQRYIHKQHNSRGGFPTIPHRPGLEEQSTPHPQSKFRTIYEL

SEQ ID NO: 368425 - protein, 109 aa, Zea mays
  Clone ID: MRT4577_99174C.1.pep
LGRFDKDSPIRAIDFGLCVSFKEGEPLMDIVGSVYYIAPDVLRTTYGHKADIWSVGDILYIFLAGVPPFWAENENGIYTDILRGKLDLSGEPWPYISLGAKDLMMKMLS

SEQ ID NO: 368426 - protein, 94 aa, Zea mays
  Clone ID: MRT4577_99175C.1.pep
HKRSVVQGSERCVKEGSGFANSGVFLSNWVGNCGHPHWFQPVRFGLSLGLLCPAHVRCGRVEFCRPCPLPPHFYPSPLSFLDSKRERSRTCSPF

SEQ ID NO: 368427 - protein, 70 aa, Zea mays
  Clone ID: MRT4577_99176C.1.pep
NPNLKPIRYGLQTLHALGCRPTNKCAELIVFRFCFQSIKNRFTFPFKREKNPRNVMEKTNTPYILKYYLF

SEQ ID NO: 368428 - protein, 58 aa, Zea mays
  Clone ID: MRT4577_99177C.1.pep
VPDRSAGPDLRVRVYAAQVEAMRSEAMKIRDELEAEKKMLHMAVAWREERVRIELVDS

SEQ ID NO: 368429 - protein, 103 aa, Zea mays
  Clone ID: MRT4577_99178C.1.pep
AASGRHGYKTLADVEGVVDGYAKARLAVDVVWRDVGYVEAFKEFTVDAVEFAAGPVREFVERLHRNGQTYVVIVDPGVRVKETYGTYVRGVQQDVLVKRNGRK

SEQ ID NO: 368430 - protein, 72 aa, Zea mays
  Clone ID: MRT4577_99179C.1.pep
AIRILQPRTRARCALSRCTILEADEATVARSGSLSRWQELCPWLGTATVTMPLRTSKCHMYKQTEEATSEII

SEQ ID NO: 368431 - protein, 140 aa, Zea mays
  Clone ID: MRT4577_9917C.1.pep
GGTATKAREKSARKGGDPTGKRKGHTAGNGPGRGPEGAPTGGETGASQEAQQQGRAKGTAPTTKKTAGQRGIPRTPLKKGNPRDLPRQARWNTDETSPPNLGDIYRTILKRPPRFFFFILDSFRLFRPFFFFFFFFFFFF

SEQ ID NO: 368432 - protein, 115 aa, Zea mays
  Clone ID: MRT4577_99180C.1.pep
MEEEVESSSAVALLLVLVAPVVVPSMALLVRGQWRRAAPRREEGEGIIIDIMTLESGLREDTHPMGAELRESKLMNKYNELKEAGKLDAFMERRRSKNASKDHWYMPYRWNGDVA

SEQ ID NO: 368433 - protein, 49 aa, Zea mays
  Clone ID: MRT4577_99181C.1.pep
TSLGLAQRCQVGGRFRLVSPYFAREDQYDLVLKVDGVSYVFRFVWNRRC

SEQ ID NO: 368434 - protein, 205 aa, Zea mays
  Clone ID: MRT4577_99182C.1.pep
MFICRCKYVHLARRKNSTVAFVFSTVPLNISFRRGLVHQLRAQWFQLVTLVAYTNLTTNKDSFRWDLTANGLFSVQSLYQAILNNGAVRDNKDLWKLKIPLKIKVFMWYLKRGVTLTKDNLARRNWPASAICWAIWLSRNDVTFNKSSPKSCLQVVLGAVMCFVKAVRMVSQSSMTEDVDFAREIVVTSTRKSVRIFSGRVLQGI

SEQ ID NO: 368435 - protein, 87 aa, Zea mays
  Clone ID: MRT4577_99183C.1.pep
SNLKIPLSLYGLVYSFSDFLSSIRILLGFIILGIRSVLRAPLIVVKSKPKISSVRAQEGCGQDLSGPKGAPARSSSKERKSKDKKIS

SEQ ID NO: 368436 - protein, 98 aa, Zea mays
  Clone ID: MRT4577_99184C.1.pep
WFRRARRSTVKGSFGPAAYPCVASIISLHGCSRQFWVSAALCSRLSKDDLNPLNFFFVIYARRQSYFLIDAVDPSPVWYATRLYGMRMCYLCSKRGGR

SEQ ID NO: 368437 - protein, 90 aa, Zea mays
  Clone ID: MRT4577_99185C.1.pep
YIPKMKEGNAEGSGEEGAIKEPVGFLGAMAPFFMFVQKNGGQRGGSGPLNADCPSCNEAFVLCWWGGSTYVMWNGGIAQALKYGWIGLVF

SEQ ID NO: 368438 - protein, 134 aa, Zea mays
  Clone ID: MRT4577_99186C.1.pep
LYAQATKAVSLRTPFEGDEAAPRVPTLPARLVSWAGPGDARKKHKKILPAPPDDAAPEPPPQSPVATPAKVGLWDQFEAYFRPVTLADIEMLRPKLPFGYSNVDSCMLIPFLGSGKESINQAETYDVAVAETTS

SEQ ID NO: 368439 - protein, 38 aa, Zea mays
  Clone ID: MRT4577_99187C.1.pep
TRKKGALNVLDNTHRLHSCAFEGHRFCNLNIHLQSGVL

SEQ ID NO: 368440 - protein, 59 aa, Zea mays
  Clone ID: MRT4577_99188C.1.pep
TYHSLCFYQSINSLGPVSIHGGTGILNNHNISTLTSHAFSGQYLHKLNNLQISNTMKPL

SEQ ID NO: 368441 - protein, 71 aa, Zea mays
  unsure (1)..(71): unsure at all Xaa locations
  Clone ID: MRT4577_99189C.1.pep
TLPSPMLPMRLPXINEAGASPALAIPTFHHHNFSLSSFLLSFEPFTSCSIFTFIYLFRTIFLKKLNFYFYF

SEQ ID NO: 368442 - protein, 73 aa, Zea mays
  unsure (1)..(73): unsure at all Xaa locations
  Clone ID: MRT4577_9918C.1.pep
FQFLGRCCNFXLTLFXIVFGALYPVPVLFXNFRXKVYAFGXEGYALXLKKFFPLFDEKGLSKIPKGPLKDKKP

SEQ ID NO: 368443 - protein, 108 aa, Zea mays
  unsure (1)..(108): unsure at all Xaa locations
  Clone ID: MRT4577_99190C.1.pep
RWTRSGAASRSSAPAPPTSRRTRRACGSTAACAATRARAAAPVPRTPPPRRGAAGRLPSRSPRSGTSASRAPTPPPPPXRRPPPPPLRWLLGGPWRGYPCPRRRWRRR

SEQ ID NO: 368444 - protein, 474 aa, Zea mays
  unsure (1)..(474): unsure at all Xaa locations
  Clone ID: MRT4577_99191C.1.pep
PPFCTPRASXRGCVRELKQMRQGDGTVMVSHFMVELQGLRSVDGEDPPRXLHLNPXSQGDWGRRPILXHNTCYRMRPGAAQRCDGTPPDDNDDKVDGFPKCEKWIRNDIVDTKESKTTSWLKRFIGRAKKPAMTWPFPFVEERLFVLTIQAGVEGFHIYVGGRHVTSFPYRPGFTLEDATGLFVKGDVDIHSVYATALPSSHPSFSLQQVLEMSEKWRSRPLPKGPVSLFIGILSASNHFAERMAVRKTWMQAPEIKSFEAVARFFVALNSRKEVNVMLKKEAEYFGDIVILPFIDRYELVVLKTIAICEYGVQNLTAANIMKCDDDTFVRVDVVLRRIKLNNGDKPLYMGNLNLLHRPLRTGKWAVTDEEWPEDIYPPYANGPGYVISGDIAKFIVSQHANQSLRLFKMEDVSMGLWVEKFNSTNPVQYSHSWKFCQYGCLENYYTAHYQSPRQMLCLWDKLVRGQASCCNYR

SEQ ID NO: 368445 - protein, 90 aa, Zea mays
  Clone ID: MRT4577_99192C.1.pep
HEVISGDIAKFIVSQHANQSLRLFKMEDVSMGLWVEKFNSTNPVQYSHSWKFCQYGCLENYYTAHYQSPRQMLCLWDKLVRGQASCCNYR

SEQ ID NO: 368446 - protein, 117 aa, Zea mays
  unsure (1)..(117): unsure at all Xaa locations
  Clone ID: MRT4577_99193C.1.pep
MSTAPVFISPGVASLDLAGTVHGCNLLGGGEITWGYRPRKVMDGGRXLNLTLDRTFWSCFQTMSEYLFCKIDMHINLIPSYXRGTVTTFYLSNTGDSHYXIDSEILGNVIGEPYSLH

SEQ ID NO: 368447 - protein, 70 aa, Zea mays
  unsure (1)..(70): unsure at all Xaa locations
  Clone ID: MRT4577_99194C.1.pep
GLDSPRFSLSTSRXXRNSSHFSSISLIMFMIFPGYGHFRVRSHATXXSNKLSCXHQXEEGFENITRRYLP

SEQ ID NO: 368448 - protein, 78 aa, Zea mays
  Clone ID: MRT4577_99195C.1.pep
MINWSAFLLLRTECISPIRTLTVYRQWILQTPRVSLERMMSDRIPVLSVIEVRCWKVLYCRHQQIIPKPLASSAIVGT

SEQ ID NO: 368449 - protein, 92 aa, Zea mays
  unsure (1)..(92): unsure at all Xaa locations
  Clone ID: MRT4577_99196C.1.pep
TIHSLYMVLTDTDLDIAAIXYLNTXESCLLTTPLEDMKRELFNLTDQHVKEVPSXDXTCESLMSKLVASDNACLRYEKEYGEFYNELELQLS

SEQ ID NO: 368450 - protein, 105 aa, Zea mays
  Clone ID: MRT4577_99197C.1.pep
DWMNRIVLLHSVQKKAPCFEQSEAQKCSQCIQLFNHLFTLSMDLPLLAASSPVLILPTLSSSLISAPPLLPVTGSKSENGQEGVSVQLDIKGWARGGVHVERPGA

SEQ ID NO: 368451 - protein, 76 aa, Zea mays
  Clone ID: MRT4577_99198C.1.pep
HVCMVFICYERTVSYGLLWSFPAWEEHVLDRLYWDKRTYVMGTSLLLTAIIGLPEEYETLLRCFRVGVSRKNPPGH

SEQ ID NO: 368452 - protein, 112 aa, Zea mays
  Clone ID: MRT4577_99199C.1.pep
MMTTRKVAAAGGGEAEEMKRRNAELERAAAEAAAREDRLRRELEAALARLAVAEEAEERLCVQLGELEAEAVEQAVEYQERVRALSERLAFLDGVLRSSGIRGFAAGVTTMD

SEQ ID NO: 368453 - protein, 101 aa, Zea mays
  unsure (1)..(101): unsure at all Xaa locations
  Clone ID: MRT4577_9919C.1.pep
TLQLSEGKWSCRVEFGVKLREGLAVAYSGQYELAGARPVAIHRRGSRVVKNRMGKGLXAIVNGTEKQYCRLLKGFFKPQGARAGLSPVLLTVSSCRWLGLD

SEQ ID NO: 368454 - protein, 108 aa, Zea mays
  unsure (1)..(108): unsure at all Xaa locations
  Clone ID: MRT4577_991C.1.pep
MKKPAFAKLAYRTDEAGVASKAKPAAAMPKAISAGASHPLXFDMSKAAITTLKVRTGISSLATAKXMGDKHGAPLPSRLAKEAXIQLPGAKTKDKLVRXRALGTLSDA

SEQ ID NO: 368455 - protein, 37 aa, Zea mays
  Clone ID: MRT4577_99200C.1.pep
RHHNIDGVGYENVNKLYTKRGEYWLMPVLTINWKVVC

SEQ ID NO: 368456 - protein, 48 aa, Zea mays
  Clone ID: MRT4577_99201C.1.pep
FLALSSQSSSVDRPTNLARRNRHDAQLATRDSSSVRDLVSRPLSLRIL

SEQ ID NO: 368457 - protein, 248 aa, Zea mays
  unsure (1)..(248): unsure at all Xaa locations
  Clone ID: MRT4577_99202C.1.pep
MAPPISTSDPALPTTTTTTSSAPKSSSRPFLAPLAASARSLLASARRSPVTTLAAAFFLLALVMYGEDARTIAELSIDDYLYPDADLYNVSGLPPLALPPLTCDLSRGRWVFDNVSVPAYREKDCTFLTKQVSCLANGRPDDMWQYWRWQPNECSLPTFDARRFMEAMRGKRLMFVGDSLNRNQWESLVCLVQPILSKGRKKIVKRGSLNTFYAKEYRATLEFYWAPFLVESXSDNPXLHSIKERIIS

SEQ ID NO: 368458 - protein, 239 aa, Zea mays
  Clone ID: MRT4577_99203C.1.pep
MAKPPPPTSTSDPALPTTATTTSSAPKSSSRPSPRPRGLLDPLAASARSLLASARRSPVTTLAAAFFLLALVMYGEDARTIAELSIDDYLYPDADLYNVSGLPPLALPPLTCDLSSGRWVFDNVSVPAYREKDCTFLTKQVSCLANGRPDDMWQYWRWQPNECSLPTFDARRFMEAMRGKRLMFVGDSLNRNQWESLVCLVQPILSKGRKKIVKRGSFNTFYAKEYRATLEFYWAPFLV

SEQ ID NO: 368459 - protein, 573 aa, Zea mays
  Clone ID: MRT4577_99204C.1.pep
MPIYVDPFVKVSATGKKSTSSQRFQWRATTVPRRTDADSCRLPDPTRRNQAYKITTPRSSPREDRAGLASPRLASAATCRAATIQPPSVLPLPQQQAPAAAMPKPPPPTSDPSLPTTTTTSTPKSSSRPAPAGLLDPLAASGRSLLASARRSPVTTLAGAFFLLALVMYGEDARTIAELSIDDYLYPDADLYNVSGLPPLALPPPTCDLSSGRWVFDNASVPAYREKDCTFLTKQVTCLANGRPDDMWQYWRWQPSDCSLPTFDARRFMEAMRGKRLMFVGDSLNRNQWESLVCLVQPILSKGRKKIVKRGSLNTFYAKEYRATLEFYWAPFLVESNSDNPNFHSIKERIISPERIEAHAKHWKDVDYLIFNTYIWWMNTADIKVRRPNSRYWSENDEVPRIEAYGRVFKTWSDWLNDNIDPARTSVFFMTISPLHISPQNWGNPDGIKCVRETLPYQNYSQPLDLYHDMRLYDLVIKVASSMEKVPVSVINITKMSDYRKDAHASVYTIRQGKLLTPKQKADPEKFADCIHWCLPGVPDVWNQILYTRILSKSPWRSNFSPPPSQSTPLPPQ

SEQ ID NO: 368460 - protein, 77 aa, Zea mays
  Clone ID: MRT4577_99205C.1.pep
MRMSCNGCRVLRKGCSDACTIRPCLQWIDSPEAQANATVFLAKFYGRAGLLNLLAAAPDDAARPAVFRSLLFEACGP

SEQ ID NO: 368461 - protein, 72 aa, Zea mays
  Clone ID: MRT4577_99206C.1.pep
MFGRAPKKSDNTKYYEILGVPKSASQDDLKKAYRKAAIKNHPDKGGDPEKVRTTPSPLLRSGLDPIWRDPLR

SEQ ID NO: 368462 - protein, 79 aa, Zea mays
  Clone ID: MRT4577_99207C.1.pep
YRPGRDDATLPSRILCAVKSNQKLREFSHATVLNADKTPGGSCASIQRLHKHNYFLDRVIRAGLVPYFFVRCALNTGPG

SEQ ID NO: 368463 - protein, 127 aa, Zea mays
  unsure (1)..(127): unsure at all Xaa locations
  Clone ID: MRT4577_99208C.1.pep
MNSNNSVQRFGKNKTATADAHCKGGKVLIKRNGRHLQFAQPEILRLXKAYEHLLGGGLDKCVNVEERVRVSEGGQVTQAYVYATQLSSSPLIDYYQKIGDDHSQXLLRKGRGQCDRSLLVADNRRMR

SEQ ID NO: 368464 - protein, 153 aa, Zea mays
  Clone ID: MRT4577_99209C.1.pep
SSVASTVCFLVHFTLHCSLRTPKPPRHTKSKTLFLCPSVTAANLRLAIEGGTHQMARVERQPRNPSRLAPTSHPAPALPTTPAARRPGTPRNAAQGTVCATCVCGSGNNARCHCKQDARSRHNQTHHGNDGTATAGGIAKPDSQDKLKMATIS

SEQ ID NO: 368465 - protein, 91 aa, Zea mays
  unsure (1)..(91): unsure at all Xaa locations
  Clone ID: MRT4577_9920C.1.pep
MDAAAMESLILELHAVEAYKFGAFVLKSGITSPIYLDLRVLVSHPRLLSRVAALLXAXXXXSXRAPYGALPSCGVPYTGXPFRLVLSVARS

SEQ ID NO: 368466 - protein, 34 aa, Zea mays
  Clone ID: MRT4577_99210C.1.pep
ESATAARVLRADHPGIKRRLAGILQSLTGNGSLR

SEQ ID NO: 368467 - protein, 350 aa, Zea mays
  unsure (1)..(350): unsure at all Xaa locations
  Clone ID: MRT4577_99211C.1.pep
MMMANAKLHKQALLPPRSPFPTAAPYADRGPIARPQVGSTHHRHGHHQRTSSESFIEEQPPSWLDDLLNEPETPAARQSGRAGHRRSSSDSFALFDGGAAGXLVLTPMVSRGWGEEVGNLRRGXVQEYYAKLAPIGRAHXAGRGSKACRIRRASGMVVACQCPQKIRLVGIMGHRKCRGSMTMAXDKRTDDAGHDQKVGAKEGVPPKHAQSEADNKRAKQQYAQRSRVRKLQYIAELESRVQALQSEGVEVSAEMEFLSQQNIMLDLENKALKQRVESLAQEQLIKRFQQEMFEREIGRLRTIYQQQQQQQAPALVRSNSRDLDVQFANLSLKHKDPNTGRDALSGPLRT

SEQ ID NO: 368468 - protein, 160 aa, Zea mays
  Clone ID: MRT4577_99212C.1.pep
KNRTVFFFFKLEKTNRLFFFFFFLGGPLKWKAPGGEGKPLQGAPPMGGNKNPKKGERKTFSKKIGRGNVFTKNGIKRVFLGKRGDLWRAEKPIMAPYIFFFFTLPILGLKKKRIKPPPRGPNPGGRAPHQAPLRGSCPRKRGNKTLITRNGPPPLYKGKI

SEQ ID NO: 368469 - protein, 218 aa, Zea mays
  Clone ID: MRT4577_99213C.1.pep
MMVLEYAANGTLYEHLHVEGFDHIDWNGRMRIIMGVAYCMQYMHELKPCITHSDLQSSAILLSKDGAAKIADMSVWQEVISKEKMPKNDDASEHHEPIRADPAGNVCSFGLLMLEIMSGKPPDSEHEGSLANLAMECIKDDQSISCLLDPTLTTHKENDLDIICELIEDCIQSDPKKRPSMREVTTKLREVLAISPEAATPRLSPLWWAELEILSVES

SEQ ID NO: 368470 - protein, 210 aa, Zea mays
  Clone ID: MRT4577_99214C.1.pep
MSYAYLFKYIIIGDTGVGKSCLLLQFTDKRFQPVHDLTIGVEFGARMITIENKPIKLQIWDTAGQESFRSITRSYYRGAAGALLVYDITRRETFNHLASWLEDARQHANANMTVMLIGNKCDLSHRRAVSYEEGEQFAKEHGLVFMEASAKTAQNVEEAFIKTAGTIYKKIQDGIFDVSNESNGIKVGYAVPNSSGGGAGSSSQAGGCCS

SEQ ID NO: 368471 - protein, 211 aa, Zea mays
  unsure (1)..(211): unsure at all Xaa locations
  Clone ID: MRT4577_99215C.1.pep
MSYAYLFKYIIIGDTGVGKSCLLLQFTDKRFQPVHDLTIGVEFGARMITIENKPIKLQIWDTAGQESFRSITRSYYRGAAGALXLVYDITRRETFNHLASWLEDARQHANANMTVMLIGNKCDLSHRRAVSYEEGEQFAKEHGLVFMEASAKTAQNVEEAFIKTAGTIYKKIQDGIFDVSNESNGIKVGYAVPNSSGGGAGSSSQAGGCCS

SEQ ID NO: 368472 - protein, 53 aa, Zea mays
  Clone ID: MRT4577_99216C.1.pep
HDSSYTPTQLSLDPGINGSPLIVFLNPHTGITIYLLRTPQPLRNTPVHVETRR

SEQ ID NO: 368473 - protein, 118 aa, Zea mays
  Clone ID: MRT4577_99217C.1.pep
WSWSAKPVQPLLKGSCLFPVFLNPLCTVLFFFPNFFQKKAHSGGPYPLLYFWDWPKGKGPCGPMGFPKRFSKLFLKTCPISLGGSLELSVGVLNGISFLLVNFRGKIINRGAELAGPF

SEQ ID NO: 368474 - protein, 240 aa, Zea mays
  unsure (1)..(240): unsure at all Xaa locations
  Clone ID: MRT4577_99218C.1.pep
PRPPTRPPTRPVMAATRALXKGDHQKAFSVINSLEIWKLLRNREHVLEMLKLKIKEEALRTYLSSYSSSYKSLSLNQLTTMFDLSEQHAHSIVSKMMMHEELQASWHQPTKCTVFHSLDQTRLQELLFQVAEKISVLVETNERAYELRTGGTLEGLPPRRRGEAQDSSKWQESFVASQGRQGGGNRFGYSGRGAASGQSGGLQRGRGNHVSRGGYGGNTRFQDASAHMVNLNRVGRVVSV

SEQ ID NO: 368475 - protein, 85 aa, Zea mays
  Clone ID: MRT4577_99219C.1.pep
KCCIYFLYWELCSALKLAVCLPPYFLKLDSLSPTFRSSIHLRRGTLNRPPSWSCTCQNLGSPAASLLFRPTATSPRHRQAHCRCS

SEQ ID NO: 368476 - protein, 93 aa, Zea mays
  Clone ID: MRT4577_9921C.1.pep
GQTWGTPKKKCAGGGFYRAGPLRFKIKKSRGPKGKNAKLTISTCFVWDIKNPPMGIRGLWTWGAIAIWGGRAAPCSEKKKFRFFLKSPPPFWL

SEQ ID NO: 368477 - protein, 69 aa, Zea mays
  Clone ID: MRT4577_99220C.1.pep
FHTGWRGKHKKGVNGGFLQQLKPQTVGMTCWVSLSQNRKFEDQRPFYQGILSSFSSRDKIQCSVPLGTQ

SEQ ID NO: 368478 - protein, 104 aa, Zea mays
  Clone ID: MRT4577_99221C.1.pep
KVRSPRVFFPPGWGPPPGVNPGAFGGIQVWQNPPLPENFGKDPGYQIGGGPLGPPWGKAPGAPPNGGALKPCGQPRNKGGDFAREGNEITKPPSQRRADPPPPF

SEQ ID NO: 368479 - protein, 83 aa, Zea mays
  Clone ID: MRT4577_99222C.1.pep
PLTTGLDALQEQTCTMYLACISRHRPASSSLDLLEKHGACLARARLTCSTMDYHAATVLPECAPITYIYEDTKTGHPVESYHI

SEQ ID NO: 368480 - protein, 48 aa, Zea mays
  Clone ID: MRT4577_99223C.1.pep
YFVCFNFQLLMLAAYSISLCSRWLMASVSNVTLWTVLQIIGLVFCINV

SEQ ID NO: 368481 - protein, 98 aa, Zea mays
  Clone ID: MRT4577_99224C.1.pep
MAYLRNKSMEFLKRFEVPAKNPSEDAQRRWREAVGTLVKNRRRRFRMVPDLDKRSQVETERRNIQVRPSRPSGEPALQHALFKFVSFSFSPFFLLDWK

SEQ ID NO: 368482 - protein, 66 aa, Zea mays
  Clone ID: MRT4577_99225C.1.pep
TMHARVRKHALYTVHACVRNESDHLYSAQITDLYFRSSQALHDVMQEDLYVPCSDGVRLRNIGPTY

SEQ ID NO: 368483 - protein, 80 aa, Zea mays
  unsure (1)..(80): unsure at all Xaa locations
  Clone ID: MRT4577_99226C.1.pep
YEVYHDAACCRIIDGLGPIDDRSVGFIVGGIILVGGAFGGESMSPKVSCGCGLFKWXWEYQXVPWVGSLIDVGRAGVIHE

SEQ ID NO: 368484 - protein, 195 aa, Zea mays
  unsure (1)..(195): unsure at all Xaa locations
  Clone ID: MRT4577_99227C.1.pep
PGRPSVRTDSGLGCFLLEXRLTVXYGHEHTLGSTECPSALCTHHRLEPDNRDVSFYFPXLQHTDNDVLLINEERYPQITPXVDIDRTTYNNLMRLLXGHLXSVTGYFKLEGAMNDDVNEXETNLVPYPRIHFMLWSYDSIINIVXGYHEQLHVXEITNXSLEAYYMLIQIPPXREPDMECCRTDRGDEKAQDENA

SEQ ID NO: 368485 - protein, 73 aa, Zea mays
  unsure (1)..(73): unsure at all Xaa locations
  Clone ID: MRT4577_99228C.1.pep
MAAGIFALLALLALSASAATATIIXQCSQQYLSPATAQRLEYPTIQSYRLQEAITXGILRALALTVQRPYALL

SEQ ID NO: 368486 - protein, 124 aa, Zea mays
  Clone ID: MRT4577_99229C.1.pep
TLKLCFFLLSYLQLQMQNKQFSRELRSAQQESASARIHQQDANKTNLQIQEMKPRIGRVRSNLLSSGLQIVLPHCSFRRTKVIFNRHRRANDPLEKRTKGQTNRKERAKPSKETKLCIGRRVKA

SEQ ID NO: 368487 - protein, 128 aa, Zea mays
  Clone ID: MRT4577_9922C.1.pep
NSQPQGPNPTSKFTKASKPFSKVFQMEEQTPPLVGLPRGPSFKRTPKGLGPGEGPPAKPKRTRYWPNQMGGTLTARHPFGRINPWKRPGPQGISPTCPRPKAKIFIPGGPLWGQGGATLCPPRRGSGP

SEQ ID NO: 368488 - protein, 78 aa, Zea mays
  Clone ID: MRT4577_99230C.1.pep
GINRRDHFFTYSQWPGTWKVERVGDNRPKILNGSPKNWSWHKNFYLPLVINKGMLSPLRGIPPTGFLGVFLTGRFPKN

SEQ ID NO: 368489 - protein, 111 aa, Zea mays
  Clone ID: MRT4577_99231C.1.pep
SSRFGSRRHTRDTNQQATICRGRIGALASGIGDGGALPSSISGASSIYSASSISGAVASSRSAPNRRWRRAILLHLRRGGIIPFGPSSIFSAAAPAAGVQNLFGDLLAHLC

SEQ ID NO: 368490 - protein, 85 aa, Zea mays
  unsure (1)..(85): unsure at all Xaa locations
  Clone ID: MRT4577_99232C.1.pep
FSRPSEDRTIPLSVIAEQTKLSISDVEYLLMKSLSVHLIEGXVDKVEHTCEQLVKAGFKKNEITYNTLEKKKKHKKKRKKKKKKN

SEQ ID NO: 368491 - protein, 96 aa, Zea mays
  Clone ID: MRT4577_99233C.1.pep
PFSRGPLLAFDDGAATVQTVKIWLLTEGEPKEQQGFSLFVTIVACLVLIWQVIISGAKSHKDQVTETEHKIRIHTLRGLLWTMSPVTRGVEPEPVP

SEQ ID NO: 368492 - protein, 178 aa, Zea mays
  Clone ID: MRT4577_99234C.1.pep
MSMGTPTSWLFASDNSRYSTRARLLFMGLSFAIGILTFLLYLAIWYLCSRRRQLRRRQRGELFAPGVGDTDGDHGMSADAIAALPTFVHGAEAPALDCPVCLGQVEAGEKVRRLPKCAHSFHADCVDAWLRAHSTCPMCRAAVGTAAAATATKQQAEVAAVVVVVPVPSPPAEALPPV

SEQ ID NO: 368493 - protein, 49 aa, Zea mays
  Clone ID: MRT4577_99235C.1.pep
PPIVSETVASAALCYSVHNQVHSAEQVIRLGSSASTSYMPDATMDMIGI

SEQ ID NO: 368494 - protein, 69 aa, Zea mays
  unsure (1)..(69): unsure at all Xaa locations
  Clone ID: MRT4577_99236C.1.pep
LFPPDPKFPPSPPFFSVWKRAHFPSLCQFFSQEVKKVWGLEKVLFLPPFXKXPFLPGYKGGGFPVPFSL

SEQ ID NO: 368495 - protein, 60 aa, Zea mays
  Clone ID: MRT4577_99237C.1.pep
FYLGGTPNQIDRRKKFCGQKLSHKHIKHAGKMLSQTLRRTYINKGIYHKRPGLCLKRHMV

SEQ ID NO: 368496 - protein, 47 aa, Zea mays
  Clone ID: MRT4577_99238C.1.pep
RGLLGTGLLKGTMSGRLWSKAIFAGYKRGLRNQREHTALLKIEGVYA

SEQ ID NO: 368497 - protein, 146 aa, Zea mays
  unsure (1)..(146): unsure at all Xaa locations
  Clone ID: MRT4577_99239C.1.pep
KRSNSEYQRKIQSLEQENEDLTRRVQTMEKGFEQMSHVKESLGKQELGGDNQAAIQSKIELLETKLAEALEENKMYRAQQKSPMPEGQPAXRNGKEGNTDRILQLEGELRDMKERLLNMSLQYAEVEAQRERLVMELKAMKKGRWF

SEQ ID NO: 368498 - protein, 59 aa, Zea mays
  unsure (1)..(59): unsure at all Xaa locations
  Clone ID: MRT4577_9923C.1.pep
WQLPISQLYFALPGNTTXRLKTXAEGVRLIAERGQCAATLLALGYAESTPADSVALCIE

SEQ ID NO: 368499 - protein, 52 aa, Zea mays
  Clone ID: MRT4577_99240C.1.pep
SLENRLDVVPPGQKMRDDISSRTVGGGGPRRSRRLTMRNTTDNELSRRLKDL

SEQ ID NO: 368500 - protein, 57 aa, Zea mays
  Clone ID: MRT4577_99241C.1.pep
CIDKSRSQGGPDSKKDLIIHKDGNSQNIAAQTFTFRELAAATKNFRQDCLLREGRFW

SEQ ID NO: 368501 - protein, 153 aa, Zea mays
  Clone ID: MRT4577_99242C.1.pep
AVRPPQQNQKRSPKPTKSMSLARSWANKPPPSNWREGTPTGRRIWCGPRPRTRRTVPICGGHRRRVGGPRFPPEDEEKEHEGRLGVPAGARVDKKETPQNGAAQKKNLPAGAQGGNSASYFGEAGGIERKERGGCRVSSWGKGEILRRLPAGS

SEQ ID NO: 368502 - protein, 98 aa, Zea mays
  Clone ID: MRT4577_99243C.1.pep
DFLPMMVRKVGVEGLIQELCKGFQLLMEPRTGKITCQSLKQNAARFGLGELHGDELPEMIREGDLDGDGALDQMEFCILMVRLSPKLMEEEAHMMFQY

SEQ ID NO: 368503 - protein, 98 aa, Zea mays
  Clone ID: MRT4577_99244C.1.pep
RRPVCLCPNCIVHGGQVASRSVAPSTSRRPSFVTLLLLLFFPAPAGTPATTTYPTHVSSSCTVQRRRGVRNSPLLSCATLSAASVSRLPLRPSPRPLR

SEQ ID NO: 368504 - protein, 85 aa, Zea mays
  Clone ID: MRT4577_99245C.1.pep
KKDPNAPKRGLSAYMFFANENRERVRDENPGIAFGALGRKLGELWKGLSDAERKPYEDKAAADKKRYEDQKATYLAGGDDDEESS

SEQ ID NO: 368505 - protein, 122 aa, Zea mays
  unsure (1)..(122): unsure at all Xaa locations
  Clone ID: MRT4577_99246C.1.pep
AGQRTTRRRCILARRQGQARGRRRQGAGGGGFIDRXKDFIHHISKKIEEVRGFSKPTGYVCGVDIPDIKLPTADLIVDLLIKNPNRVRIPLVDIDYLMDSDCHKLVPDLITDAGTIHAHRQE

SEQ ID NO: 368506 - protein, 127 aa, Zea mays
  unsure (1)..(127): unsure at all Xaa locations
  Clone ID: MRT4577_99247C.1.pep
MAARSSSQQLVAAAVLAAALLLLAAGAGTPSSAEICAEATSXSVAPRLGYATGRAASASAACCTDVRSLNSRASPAADRQDTCDCLNSMTERLGGGDSMVNAANIPGKRGDSIRVPIRPSADCTKIN

SEQ ID NO: 368507 - protein, 63 aa, Zea mays
  unsure (1)..(63): unsure at all Xaa locations
  Clone ID: MRT4577_99249C.1.pep
VFVFXVAXRXXVXFFLLLXXXXVCCXRGXXXLGCVVXRCALRGAVRASLHIPPWVLXSRXEXX

SEQ ID NO: 368508 - protein, 100 aa, Zea mays
  unsure (1)..(100): unsure at all Xaa locations
  Clone ID: MRT4577_9924C.1.pep
MENDVEKNNMVKEFYIPTYIFVPESPVEHASQIPTCPVIVFVNTKSGGQLGRDXIVTYRKLLNLPRYLDLLDEAPDNVLHRLYSNLERLKHXGDTLASEV

SEQ ID NO: 368509 - protein, 148 aa, Zea mays
  Clone ID: MRT4577_99250C.1.pep
MGTIVDADVGFAVKRTSRSLVPPASETPRETLRLSVIDRVAGLRHLVRSLHVFAAGGDKKPRLDLLDLRYFTADLSPDHIGKVKARYLESTGQRCSAFDVCVARTWQARVRALRLLDPAAPVHVCFFANTRHLLPAAATVGFYWNWFY

SEQ ID NO: 368510 - protein, 164 aa, Zea mays
  unsure (1)..(164): unsure at all Xaa locations
  Clone ID: MRT4577_99252C.1.pep
APRQCGRAGCAGTASPAPATPVRTGXPPSDPATAAXGTGSPGGAPRGVAAPGLVGSDASLPAAPTGGQPXPGRVALGPXQHGLLGCPTRARGAPAAGPRGGTGXSSPSGRGRXRPSGRTAAQAQPRPCGRGGQPPADRGRGPAAAPCAMMNFVYFQHWKYPFRA

SEQ ID NO: 368511 - protein, 435 aa, Zea mays
  Clone ID: MRT4577_99253C.1.pep
MGTIVDADVGFAVKRTSRSLVPPASATPRETLRLSVIDRVAGLRHLVRSLHVFAAGGDKKRQQATATPAKALREALGKALVDYYPFAGRFVVDDAEGGGETRVACTGEGAWFVEANAACSLEEARHLDHPMLIPKEQLLPEPSPDVNPLDMPLMMQVTEFSCGGFVVGLISVHTIADGLGAGQFINTVATYARGATSATPKPVWARDVIPDPPKMPAPPPRLDLLDLRYFTADLSPDHIGKVKARYLESTGQRCSAFDVCVARTWQARVRALRLPDPAAPVHVCFFANTRHLLPAAATAGFYGNCFYTVKATRASGEVAAADVVDVVRAIRDAKARLGADFARWAAGGFDRDPYELTFTYDSLFVSDWTRLGFLEADYGWGTPTHVLPFSYHPFMAVAVIGAPPKPKPGARIMTMCVQEQHLPEFQEQMMSQQAA

SEQ ID NO: 368512 - protein, 97 aa, Zea mays
  Clone ID: MRT4577_99254C.1.pep
DISATTALLLLLAAGAGTATAAVSCGEVTSSVAPCLGYAMGSAASPSAACCSGVRSLNSRASSTADRQATCNCLKSMTDRLGGGFSMVNAGNIPGKC

SEQ ID NO: 368513 - protein, 54 aa, Zea mays
  Clone ID: MRT4577_99255C.1.pep
KNMSQDSSLSDVQSVREALATAVLVAGDHGLCDNGTTGWLSPRPRVGGRPVDPK

SEQ ID NO: 368514 - protein, 122 aa, Zea mays
  unsure (1)..(122): unsure at all Xaa locations
  Clone ID: MRT4577_99259C.1.pep
PYAILLQVVMLLLTIIFAVVHSGMASLRESGEKIVGERVYRVLFAGISLPLAVTTIVSPWCSFPKGRYTSMINKSYCALYSFHIFXVYFINHRYDGTQLWQVQGITGIHELLWFSSFISFFF

SEQ ID NO: 368515 - protein, 146 aa, Zea mays
  Clone ID: MRT4577_9925C.1.pep
MKRFVYINDDSCRYSYCDNRISNTKYTLWNFLPKNLWEQFRRFMNQYFLLIACLQLWSRVTPVSPATTWGPLIIIFIGSASKEAWDEYNRYLSDKKANERKIWVVKDGVRIQIKAQEVHVGDLVWLHENDEIPCDLGLIGTSDRQG

SEQ ID NO: 368516 - protein, 218 aa, Zea mays
  Clone ID: MRT4577_99260C.1.pep
MVKLTMIARVTDGLPLSEGLDDSRDLKDADFYKQQAKLLFKNLSRGQHEASRMSIETGPYLFHYIIEGRVCYLTLCDRSYPKKLAFQYLEDLKNEFEKVNGSQIETAARPYAFIKFDAFIQKTKKLYLDTRTQRNLAKLNDELYEVHQIMTRNVQEVLGVGEKLDQVSEMSSRLTSDTRIYAEKAKDLNRQALIRKYAPVAIVIGIVVMLFWVKNKIW

SEQ ID NO: 368517 - protein, 170 aa, Zea mays
  Clone ID: MRT4577_99261C.1.pep
MARVRSTTRVTREGEETEATEIAPISEVMRQSGLVVTEGAIEEGAPAAEAEQDVEEENADEEEEDYNILVPSKPSHLDFEKSTVSEADMPIMMKLGYFGEAEKKLIRFAEEETTSKPKDDEVVVFKSFFRAGLRFPLNEIIGEILDNYEIFLHQLTPNAIVRLRIFIWAL

SEQ ID NO: 368518 - protein, 91 aa, Zea mays
  Clone ID: MRT4577_99263C.1.pep
LATENQIIAIRPLYNNTAMAKRYKCTVDNTIQRDLPHSNQTRSAATYITLLGGTPRPCSGSMAHGVPPNLTANRDHTATGILPNKPLSRSH

SEQ ID NO: 368519 - protein, 95 aa, Zea mays
  unsure (1)..(95): unsure at all Xaa locations
  Clone ID: MRT4577_99264C.1.pep
IFFFFWSSFFFFFFFFFFFFFFFFFLKNPKNPRGFGKNLNPPKKPXPGGNSPGXPPPPKRKPPGGVNLSKSPKVPGGSPIRAGENWVLKPPPPTL

SEQ ID NO: 368520 - protein, 131 aa, Zea mays
  Clone ID: MRT4577_99265C.1.pep
MPNESVIEAMIKGLRPGPTTQYFTRKSPQTLEKLLQKMDEYIKADNDFRQRREEACRYSEMTRGIGGRFHPRHVMTIHNPSSSDDRGNHTQGHQHSSQSSGTQQSSFRPPAPRETMEKEGQLLLQIIPANP

SEQ ID NO: 368521 - protein, 93 aa, Zea mays
  unsure (1)..(93): unsure at all Xaa locations
  Clone ID: MRT4577_99266C.1.pep
DQCTDAKFLVKELRIGVRFRGPLRRDAVREXVDAAVAGPEADAMLANARRWSAAAREAVALGGSSDAHIQAFVDEVARRACVVPPSSEIPSPS

SEQ ID NO: 368522 - protein, 81 aa, Zea mays
  Clone ID: MRT4577_99267C.1.pep
MCLGSLLVILWRRRNKQAANLLSVVVASGLICGDGLWALPSSLLAIFKVEPPMCMKFLSNYQTEQMRKHLILAAAARRRTS

SEQ ID NO: 368523 - protein, 95 aa, Zea mays
  Clone ID: MRT4577_99268C.1.pep
YPDSLPQPDSPHSQIFRKAGQKKAEPNRPLVYYPFVENIKKRRGHERPCCLKKKTRIVLLMYSSPGDSNPLSHVYCILNYSQCIHGVEAKSHDAL

SEQ ID NO: 368524 - protein, 237 aa, Zea mays
  unsure (1)..(237): unsure at all Xaa locations
  Clone ID: MRT4577_99269C.1.pep
DGFCRSPLVAAGPRAPASSLAKTDIAAPGGVRSAHIPSQRPPPARLPLGTSAGSPVPGVRYVPLSGSPSARSLLTPHPAEAAGGALLRSSLPARCARLCGRXXPPXXRXFXPPPXPXLPPXPPPXXXPAXGXQPAPGPPXPAXPPSPPPPXXXPPPPPPPPPPXXPPPPPPAAPPPXPPPPAPPPPPPXPPPPPXPPPXPXPPPPPXPPAPPPPPXPPPPPPPPPPPXPPPPPPPPP

SEQ ID NO: 368525 - protein, 197 aa, Zea mays
  Clone ID: MRT4577_9926C.1.pep
MAEDSGAILRHISSVKDMVDKVNEEIEQNIQKTREIESEIVQHSETEKHYLNKESELTKEVSVTEFELNGLIQVAVAEGNLEFQKVAHDVIRKRVSDKMEKFINESMGFQANMLKSSNEDLVLLLNEKSSLEDESAKLKVKINSIHSSSKEYIAEILEEVNTENSVLESELRYMISEYKDVQKDINNLKILFSSSNS

SEQ ID NO: 368526 - protein, 84 aa, Zea mays
  Clone ID: MRT4577_99270C.1.pep
TIICYLHLLASLKSKFCVEPGLPPPNAGLVGLAPPEMLTPLCYTSSDTPPLPQDILFASAWPPLAVMFCLSHGCSPGSGFPRAP

SEQ ID NO: 368527 - protein, 128 aa, Zea mays
  unsure (1)..(128): unsure at all Xaa locations
  Clone ID: MRT4577_99271C.1.pep
LILDXXAGGGWFXSAAGGGGVPFVWVLPLLRRAFVVVGLCSVFAPRCPFFFLLLXXGGLGGLSXLRLLFCCLLVLLLRCFCLVCLLLLLFLLSLFLLGSAAVPLSXLXLPVVXCRAGFSVLPLFLLPL

SEQ ID NO: 368528 - protein, 86 aa, Zea mays
  Clone ID: MRT4577_99272C.1.pep
MVSAMKLSVTLVLLLSGLVVFGEIADAKAKAPCAVVCFQGGHITCDNYPGQELDGCDCECAPADGKGCVLHLDDGVTHTNCRTPNM

SEQ ID NO: 368529 - protein, 67 aa, Zea mays
  Clone ID: MRT4577_99273C.1.pep
IEFRGNNRRDKKLDGRGSKVGLFKGGGQFYYFFFFMIFFCSFPFFKFNFPFFFFFFFKKLNAKQGAR

SEQ ID NO: 368530 - protein, 144 aa, Zea mays
  unsure (1)..(144): unsure at all Xaa locations
  Clone ID: MRT4577_99274C.1.pep
MNEGENETKRIMHDRTTMAEQLQGASKLLAGAELVAKGAFIPTTAQXIGACYGXLVNNLXPGSTNGEDLYRYKGIKGMRIYYRDAKDLDAVQKSGIALILDTDNXEXLGHLPRSAYVADSWVHSNMRPYYPGXRIKNDTAGNEE

SEQ ID NO: 368531 - protein, 122 aa, Zea mays
  Clone ID: MRT4577_99275C.1.pep
LLGRGTPSHAGHTLHAPTSMLVSIVARLVVSDRANNGRKATGIGHRRVSLTGRRCHHLVSMGNSCRRWGLVTRELVSWWLGANGSLQLPQLGRSAAARVQRRMDTDQWSDVDRRWQLVLLCK

SEQ ID NO: 368532 - protein, 80 aa, Zea mays
  Clone ID: MRT4577_99276C.1.pep
GPATMGCGPAAESASDDQLFGPSSQILTQRSKVRRPHTRTKPSRSLIESRAATWARSLPAEPSTTLSSPCARPHASAHAS

SEQ ID NO: 368533 - protein, 61 aa, Zea mays
  Clone ID: MRT4577_99277C.1.pep
GTLLTLGEGLVLEGALLLQYLCHFFLVKADWRALSFIYGGDILLHLHHLTSLYGKAGIRHA

SEQ ID NO: 368534 - protein, 44 aa, Zea mays
  Clone ID: MRT4577_99278C.1.pep
SSDVRHAGFTFVCGSFFLYLLDYDRLSLASVAREWLCSKNYAWS

SEQ ID NO: 368535 - protein, 51 aa, Zea mays
  Clone ID: MRT4577_99279C.1.pep
DPRVRCVWTTILQRRVRVRYHRSQHRQNIISRRQEPFPTHREEGALALSEP

SEQ ID NO: 368536 - protein, 62 aa, Zea mays
  Clone ID: MRT4577_9927C.1.pep
RFPGATRRPCTQMRTCLFTTHAALGDWTRCGAPHKQAGAAASPHHTFIPPYCSLYARLRPIC

SEQ ID NO: 368537 - protein, 245 aa, Zea mays
  Clone ID: MRT4577_99280C.1.pep
MASGQDSSGTTLIIRHEADPSATSTAGASSQQQSSSGVGSAGGSLLGKPVAPAADRKSKKGTLMQIQNETISAAKALNPVKVLPQRNRKKKPVSYAQLARSIHELAATCDQKSSQRQLVNSVFPKLAVYNSVDPSVAPSLLMLHQQCEDRNVLRYVYYYLARILSDNGSQGLSAAGGIPTPNWDALADIDAVGGVTRADVVPRIVDQLSAESSSDDVEFHARRLAALKALTSCSTSSSEMMEKLK

SEQ ID NO: 368538 - protein, 187 aa, Zea mays
  Clone ID: MRT4577_99281C.1.pep
LCGAQAAVWDEDKCPPPPPRLRPRRCLPWAAARCSTSKFTRDSRVSVRNPLMIRNLKRNARSSCMTCPRDMAAEEPDRHRIRYHHVYGDVQAVPAHQRQQPLEVLLHPASAINWSTSPRPSPDTSTRSVMRLATCDLGLFIELTFSQIELQGMTRRLLQEVKRVRSYPSSLLLRCDALRVCSPQSNL

SEQ ID NO: 368539 - protein, 65 aa, Zea mays
  unsure (1)..(65): unsure at all Xaa locations
  Clone ID: MRT4577_99282C.1.pep
KGRKKGEGGPPKKKGRKGGKKGKKFGRNLGLGGVGGLPSRFLLXPGQGILNPLPKRGNWPLKRMV

SEQ ID NO: 368540 - protein, 102 aa, Zea mays
  Clone ID: MRT4577_99283C.1.pep
SNGCGLYKLNKCEKSDPNYSRLKKRKTAPEPVSASRPQSHLTGYSSRPADHTQRVGNYAYAITRYVPPARPRGANYPLPHRRASSNHLVARREVSSHSSDER

SEQ ID NO: 368541 - protein, 51 aa, Zea mays
  Clone ID: MRT4577_99284C.1.pep
ALIKPANLSMTGLCCVLYYQRNFLGIDTARGLALFSQKRLNASLAKPNIKP

SEQ ID NO: 368542 - protein, 36 aa, Zea mays
  Clone ID: MRT4577_99285C.1.pep
RSCCNAAALKAKGGDNHKNSGVSCIRTRRQEGPRSH

SEQ ID NO: 368543 - protein, 292 aa, Zea mays
  unsure (1)..(292): unsure at all Xaa locations
  Clone ID: MRT4577_99286C.1.pep
LGGGXSDREVGFAKLHGECFEYYMQTYSIVLGRHSRRRSKGPVAAPPEADDGVDVDLGALGAGMNVSRRHARIFYDFLRRRFALEVLGKNGCLVEGVHHVPGSAPVKLDSQDLLQMGDTKFYFLLPSRSVFDAGITRRSSAVQRAIPPPPSDDDEDEDEHEEXRGSGXKRRRDGYNGSKSYREADDQLLLQLEEKDVISSAATILSDLCGPQEWISINKLHEVMFDKYGGMWHHSRVRKYLTSEDFAEAETDGRLWHGLALLLRKYPEHFVINIRKGGGLITEFVSLVSLQS

SEQ ID NO: 368544 - protein, 100 aa, Zea mays
  Clone ID: MRT4577_99287C.1.pep
EPEDSTRRKTRDACACDPTMHDEEELRMVNLFSRRPLPTLLLLLYWMIPPKIHNSKSRTCSSCKDDNNDSREDKCMVMDIMNKTADTKMVTNMRHVLRRY

SEQ ID NO: 368545 - protein, 57 aa, Zea mays
  Clone ID: MRT4577_99288C.1.pep
RDPKICFPNGRFLPPLFNLNPPELKGVPANNVPKLVPEHAKKQCSYVGSSNARPLGL

SEQ ID NO: 368546 - protein, 81 aa, Zea mays
  Clone ID: MRT4577_99289C.1.pep
QDKVCACRVALIMNGEHTRKYLQSIKRLVTSCQRRYPALPSGSVEFYSLANGSDLQARLSKQNGSGRASEARLRLMPASKQ

SEQ ID NO: 368547 - protein, 76 aa, Zea mays
  Clone ID: MRT4577_9928C.1.pep
APALLPLFIMEGGSPFGALLFFFFFQNPTGVNNSIDGWFLISYGFFFRGANLVRVLWVSFQVSWVALMLKKKKRLC

SEQ ID NO: 368548 - protein, 90 aa, Zea mays
  Clone ID: MRT4577_99290C.1.pep
MGNKRAAAVSAPVPALASEPESDHFSDYGFYPQLLHFPCEGEAKRPWGRRQRHQQSAQLKPLYSARIKLQKPIVKKHHRQQKQEDRRRCW

SEQ ID NO: 368549 - protein, 79 aa, Zea mays
  unsure (1)..(79): unsure at all Xaa locations
  Clone ID: MRT4577_99291C.1.pep
VWECGMRLPQFFTGLKWMNLALLPKIPNCQGWRSIPPPKLELAFHPDPACNSPAPNVKYACRLSCAVPYYDKSWLFQXX

SEQ ID NO: 368550 - protein, 87 aa, Zea mays
  unsure (1)..(87): unsure at all Xaa locations
  Clone ID: MRT4577_99292C.1.pep
XXPXLLLPXPPSTASACSPSXVIMSCSSXKXDCGSSXSCGSHATACXLTWRPXXPXXSRXRXXXRRXPXSXXLLRGGXRGXXXDCXT

SEQ ID NO: 368551 - protein, 164 aa, Zea mays
  Clone ID: MRT4577_99293C.1.pep
YSIKQARNVHLIRSVIMYFEHVKHFCFFLKLLIKNRWSKSTVQVPFPFPGTTGTGLLSPLRLLLRFLRSFKGRQQSTDASHITHPGCRCARGGELFGSYLRHCLSVTGIFFIKKSQKSIHFSIRNYRDRKFQKGLAAEEELRPTGHCRMGHARLGGGGTKAVLQ

SEQ ID NO: 368552 - protein, 216 aa, Zea mays
  unsure (1)..(216): unsure at all Xaa locations
  Clone ID: MRT4577_99294C.1.pep
NXAGRFERNPEKNAAEKLPVEQTEAGSCNPASVGSLVVDAKHGRGRPPKDGYPSTPPEDKDESRAPSLKPKRRRRLRGQGMATTADSSGEALVAGKKDSSEEHEPPRELALVILDDSSNTPTMDKACTKVPPTTRPVDGGQPLDLSATPKGRRRQRKSVAVATGGRSALTPGKKLGCKVSSASPKFAPVVAAGCRTPASVADQGGRKASATLSVTA

SEQ ID NO: 368553 - protein, 117 aa, Zea mays
  unsure (1)..(117): unsure at all Xaa locations
  Clone ID: MRT4577_99295C.1.pep
CAPGCCGGWPSCARGWCGACGVRLSSWSGFPVCPWARSACASPPAARSSASVGSGPSSPXPSLSPASGSLLVGGSLGAAGGCRCGLGWCCGAFSGGXVCGCSFASLWSVGRSLCSLS

SEQ ID NO: 368554 - protein, 86 aa, Zea mays
  Clone ID: MRT4577_99296C.1.pep
HLSLSSVKLHFSMLFYHAIKSDVKDYEAKKFMIPQKSEAIPSKKCISSMKGSTVKYTVVIRFVRAMTIRSKLSKINNFVCKTSCCV

SEQ ID NO: 368555 - protein, 42 aa, Zea mays
  Clone ID: MRT4577_99297C.1.pep
LSIGMGTSCRSSSLTRSSRLVRTSLTSATSCVVFVLEQTQPY

SEQ ID NO: 368556 - protein, 83 aa, Zea mays
  Clone ID: MRT4577_99298C.1.pep
GQSLGSSACRPSWSGSGISIISLGQCKLQRVTKLVQPLQPSRVPLQLPYRLKTPNKTFQIRIRNYIPPGLVYQVYKSPIQKVY

SEQ ID NO: 368557 - protein, 77 aa, Zea mays
  Clone ID: MRT4577_99299C.1.pep
SDTDIGVAPDRTPLDLSVKLKLCPYSPNPASMNDTNRSSSAKHLALSCPSGMQTECCTCSVPRAELTAVHLNNMSSW

SEQ ID NO: 368558 - protein, 264 aa, Zea mays
  Clone ID: MRT4577_9929C.1.pep
LVDEQTIAYWEDRLRSWGYDPLFLGVVKLSEEIQLRTFGEGQTTVVVGPSGVGKSSLINALRCNQDISEEDPIHKLVEQNSKWFGEQRVGTVSKKSGKGKHTTRHVSLLPIASGGFLADTPGFNQPSLMKVTKKSLAETFPEIRKALNENEPKKCLFNDCVHLGEHGCAVKGDWERYPYYLQMLDEIKIREEIQLRTFGTKREGDVRYKTGVMGVKQAEPRLELKKHRRVSRKKINQSILDEIEDDVDDLDDDYQFDVKQRSRK

SEQ ID NO: 368559 - protein, 66 aa, Zea mays
  Clone ID: MRT4577_992C.1.pep
EQVNRLHTERSAIKALLSRNTSCTLIRYCLKKRPKGEDRNAPREDACKVTNHNSQVADQPTAGCVP

SEQ ID NO: 368560 - protein, 115 aa, Zea mays
  unsure (1)..(115): unsure at all Xaa locations
  Clone ID: MRT4577_99300C.1.pep
ILYWYAQPLFNDRRKLPKTADPRLQGHLPTLGLYQPLAMASMSIQSEAASLPLITDVMTAMTYLANQIYHPSLALACIKAYGNXTKADPEQXRPLSKNDYATSSSHTSPCTDRTI

SEQ ID NO: 368561 - protein, 92 aa, Zea mays
  Clone ID: MRT4577_99301C.1.pep
SLCLCFFNPTSPLMLHHILHINKHMNMYENDNLLRHIVVPMKDKFLKYWGTIPLLYAFAFILDPRAKMRGFNNVLALMSQLTHSDYSGYLTS

SEQ ID NO: 368562 - protein, 48 aa, Zea mays
  Clone ID: MRT4577_99302C.1.pep
SILRTIWKIRQPYISQIPLIKCVSWFICMSVILLRQDVLRILGTVGLW

SEQ ID NO: 368563 - protein, 95 aa, Zea mays
  Clone ID: MRT4577_99303C.1.pep
RHSSPIEADEVHCAVLLCGNHGSNPPCLRARLAVAHPVLRVPRLVSFLGVLLIQRALQIPGDDTARLRARGWDVLVPAPSHRAAFFTGSMYLTSS

SEQ ID NO: 368564 - protein, 37 aa, Zea mays
  Clone ID: MRT4577_99304C.1.pep
TKATIGSTHVPMGASASDWLYKRGLKHSDRLFKTSDT

SEQ ID NO: 368565 - protein, 44 aa, Zea mays
  Clone ID: MRT4577_99305C.1.pep
MPALASANMARAADAAVALPPLLTASSSSSWVTTPAGCALTTPR

SEQ ID NO: 368566 - protein, 95 aa, Zea mays
  Clone ID: MRT4577_99306C.1.pep
KPKIMRRWISPKKESDATSVRRPSHPPSRYYSSPAALGIRSISTDGKISVVNDAPLLSLKQPYGSNLTREATSAQSAPSPPQKSLLLGAQSASRS

SEQ ID NO: 368567 - protein, 43 aa, Zea mays
  unsure (1)..(43): unsure at all Xaa locations
  Clone ID: MRT4577_99307C.1.pep
KKSGGLLTVFVAKFXNIKLHSSPESFNNSFCLNINNSKSCNSY

SEQ ID NO: 368568 - protein, 77 aa, Zea mays
  unsure (1)..(77): unsure at all Xaa locations
  Clone ID: MRT4577_99308C.1.pep
LENYSYNMLNTIKDEKRAVKLPAYDNKKIEDAIXAAISWLDTNQLAEADEFEDKMNELESLFNPIISKIYHGTYEHM

SEQ ID NO: 368569 - protein, 83 aa, Zea mays
  Clone ID: MRT4577_99309C.1.pep
MEARMMEEREAEREARLADHQRMAEMFQYMQSLGAAQGFAPPPPLFPAVDPAIFHTPGQSGATCNNPHEGFSPTQHQSNSPPP

SEQ ID NO: 368570 - protein, 102 aa, Zea mays
  Clone ID: MRT4577_9930C.1.pep
VPYHCLGGVYKKNFGGPILKVEKNHTVDILAWWKAHKEEYPLLGQLAHDVLAMKVSTVASESAFSAGGRVLDPSCTRLDPTMVEALVYTKDWIARARNGSKA

SEQ ID NO: 368571 - protein, 82 aa, Zea mays
  unsure (1)..(82): unsure at all Xaa locations
  Clone ID: MRT4577_99310C.1.pep
DTDIPQXFLTRPGVTATTDRWALPPXSRPSYCRRQKNGAPPDNTTXPVXPPXKCAHXPTYMVXSWXDPXIRXXGHTGAILWI

SEQ ID NO: 368572 - protein, 60 aa, Zea mays
  Clone ID: MRT4577_99311C.1.pep
AYCHDQFGGSMRSYRQYTIESGDNVFSLFHTFSKLSAQKNVIRPCSPTRGRTRGRTRGSL

SEQ ID NO: 368573 - protein, 96 aa, Zea mays
  unsure (1)..(96): unsure at all Xaa locations
  Clone ID: MRT4577_99312C.1.pep
KKDKKSAEIFVPLGLRPRPPKKPRKKKPRQKKPQKEKGGPREKGGKGGNKGGPKGXKREKKEGPPGPSXKPKKQGNPRPPNPLNNPKKNLPDGKLP

SEQ ID NO: 368574 - protein, 56 aa, Zea mays
  Clone ID: MRT4577_99313C.1.pep
RKKKNVLALLVGDEHRCNKHFIKLVRNVFVSPVSGIFMFVPKEVLCKGVCILLSRC

SEQ ID NO: 368575 - protein, 50 aa, Zea mays
  unsure (1)..(50): unsure at all Xaa locations
  Clone ID: MRT4577_99314C.1.pep
KGRLAMLSMFAFFVQAMVSSKDPLXNLPDPIADPVNNNAWAYATKFVPGK

SEQ ID NO: 368576 - protein, 114 aa, Zea mays
  Clone ID: MRT4577_99315C.1.pep
MTYFVFFFFFRNPAKEPTAQTTAIKRSNIRAGPRGQTLGAKWLQRPHAGEKQKDNMALTANRLKKKPRMVGYSPKTEIKPKELEHPPQKPENEKKTTRKKQKPGGGPFLILRKP

SEQ ID NO: 368577 - protein, 87 aa, Zea mays
  Clone ID: MRT4577_99316C.1.pep
NPKLLRPNSYFDNSCFKILIKISSIKPCQPLSIVQISENSKNTLVLYFAYNFPIRTESDNSFATILINSELYRTKPHVPSYKYTQLQ

SEQ ID NO: 368578 - protein, 45 aa, Zea mays
  unsure (1)..(45): unsure at all Xaa locations
  Clone ID: MRT4577_99317C.1.pep
PRNGGGGYGGGGGXWGGGGSGGGGGGYGGGTRGGGYGNSPGNWRN

SEQ ID NO: 368579 - protein, 91 aa, Zea mays
  Clone ID: MRT4577_99319C.1.pep
LAIDHTTAPHVPDSPCYVIHSLDSLSSDLDWSLMIRASRNGQLSPPTCATTTAAAGRTTTPTLSPSACTNNNTNNNACSDTLLMTRTPWLT

SEQ ID NO: 368580 - protein, 122 aa, Zea mays
  unsure (1)..(122): unsure at all Xaa locations
  Clone ID: MRT4577_9931C.1.pep
RRRSRCSIRSRGRTASRPTTRRTASXVEHRHRMQPEGXSRPPRSTASRTRRHSARRCSARSRPTRSRTRTRPTCSPTRSTRRRTCTHCSRNSSNSRSRSRASASKPRLNGPPPARATCGRRD

SEQ ID NO: 368581 - protein, 150 aa, Zea mays
  unsure (1)..(150): unsure at all Xaa locations
  Clone ID: MRT4577_99320C.1.pep
MRPTLRLHCEVLAHLFRLYTPLFFFGIKHPCCGGGGAFLFPLPKLYKARNXNDVYTLILFWVTLLCTFCHSLVLLCVPFFTYKILALDICSLGYVWTIALVLFSTILLALYIHSRVLITHLGARGHLPSTFLCAMFLDSIPFFPHSGTVY

SEQ ID NO: 368582 - protein, 256 aa, Zea mays
  unsure (1)..(256): unsure at all Xaa locations
  Clone ID: MRT4577_99321C.1.pep
MMRQQQQLPPPPQHPPPQASSAGGGGGGEFYRGPPMRQLSAASSTNLPPDYAAHPAPPSQQQHQPPYDAYGDSFGAKRMRKPVQRRTVDYTSSVVRYVQARMWQRDARDRFTLQPTPAAVLDXNELQMLPSVAYPDNPSTSFAAKFVHSSINKNRCSINRVLWTPTGRRLITGSQSGEFTLWNGQSFNFEMILQAHDLPVRSMVWSHNENWMVTGDDGGAIKYWQXNMNNVKVNXTAHRESVXRGLSFSRXTDLKF

SEQ ID NO: 368583 - protein, 96 aa, Zea mays
  Clone ID: MRT4577_99322C.1.pep
GSFPGPQVQCSPQERAIRPCPPEGGTLQGHQRNFFFQQRLRGGGIFLSRRKSCLARGESRSGVVSTMSWGRDFIPQAELCFTGKDKFVRLCPKTPH

SEQ ID NO: 368584 - protein, 137 aa, Zea mays
  Clone ID: MRT4577_99323C.1.pep
VGGVPVVAQPAQTVACGLYPPLQSGAAISRGSGPCPLLVHVRQSGRQPRQLVGSDPSGRSRSKCPRTTASILLAAKEGQPTQRQWWAGTSFSIAMHGRTEGGARQRKYISSRRLGWFWFCPGGHFFFFFFFILKPGR

SEQ ID NO: 368585 - protein, 113 aa, Zea mays
  Clone ID: MRT4577_99324C.1.pep
REATVMAPKYSTRMHMCLIRRRRRGYGEMTRAGAVGGSGSCVGREEGRRVRDCPPPPQRQGASDTDRGGLIGRKKEEVRGLPDASDGDTNAVRYAARFTTALEAIYTRVSATI

SEQ ID NO: 368586 - protein, 145 aa, Zea mays
  Clone ID: MRT4577_99325C.1.pep
MISSKKLAQLSKKMQGMGAVGRRRVTVVRKEINPSCSSIVAGKGNCIVYSSDGKRFEIPLSYLHTAVFVELLKLSQEEFGFTSDGRITLPCDKAVMEYVMCLLRREASEDVEKALLSSIVMSCHHTNRMVQPPSGVNHHFAVCSS

SEQ ID NO: 368587 - protein, 478 aa, Zea mays
  Clone ID: MRT4577_99326C.1.pep
MAASLLRRGVVTSRRRCPVEMLRRLVSSEAAADRAPSRPPPEMPPFDHRPRPYAGLGGAEIFEKRKAVLGPSLFHYYQKPLNIVEGKMQYLYDEHGKRYLDCFGGIVTVSCGHCHPDIVNAVVEQTKLLQHTTTIYLHHTIVEFAEALTSKMPGNLKVAYFVNSGTEANELAMLMARLYSGNLSMVALRNAYHGGSAGTIGLTGLQTWKYPIPQGEIHHVMNPDPYRGTFGSDAAAYAKEVEEHITYGSSGRVAGFIAETFQGVGGAVELAPGYLKLAYDIVRKAGGVCIADEVQSGFGRTGSHYWGFQTQGVIPDIVTMAKGIGNGLPLGAVVTTPEIASVLAQKIQFNTFGGNPVCSAGGLAVLKVLDKEKRQAHCADVGSHLLERLKSLQEKHEIIGDVRGRGLMLGVELVTDRKEKTPAKSETIELFEKLRDLGVLVGKGGLHGNVFRIKPPMCFSKDDADFLVDSMDYAMSRL

SEQ ID NO: 368588 - protein, 181 aa, Zea mays
  Clone ID: MRT4577_99327C.1.pep
VLTDPGGSLLHAIAKSLKLDDVRLGHMEMDPAEAWNAYCESFELANWTPTAAQVCAPAAGLPHPLLEYASIDIDMDMDIFGACCSLHRQQAPVPASAALSMGVGGHGQQLAADYNSVEDFRGIVNTVRQEGISVDRPVTNEFRTDETSLMKKKMHRYPASLQGISESYTRTRGLWPSALTT

SEQ ID NO: 368589 - protein, 204 aa, Zea mays
  unsure (1)..(204): unsure at all Xaa locations
  Clone ID: MRT4577_99328C.1.pep
MAASLLRRGVVTSRRRCPVEMLRRLVSSEAAADRAPSRPPPEMPPFDHRPRPYAGLGGAEIFEKRKAVLGPSLFHYYQKPLNIVEGKMQYLYDEHGKRYLDCFGGIVTVSCGHCHPDIVNAVVEQTKLLQHTTTIYLHHTIVEFAEALTSKMPGNLKVXYCLSGCSHNTHHFIYVXILQVAYFVNSGTEPNELAMLMARLYSGN

SEQ ID NO: 368590 - protein, 68 aa, Zea mays
  Clone ID: MRT4577_99329C.1.pep
VELVTAHASAHASADAWVELFEKLRDLGVLVGKGGLHGNVFRIKPPMCFSKDDADFLVDSMDYAMSRL

SEQ ID NO: 368591 - protein, 120 aa, Zea mays
  Clone ID: MRT4577_9932C.1.pep
LRVGQGRPIYWTQDFSGSHSNRRVTHSGPQSARAPQRPTTSCVRYQRRLARAKMLGTSTGQLLVILGAGSDMMNPRAIAQTARTAGRATVRAIKRVIWAGHQLGESLGQQGATQRYNELK

SEQ ID NO: 368592 - protein, 68 aa, Zea mays
  unsure (1)..(68): unsure at all Xaa locations
  Clone ID: MRT4577_99330C.1.pep
RSVNXPGSTPRPSVARRDGXISXPFEKVSNXQAHLYSXFTTWXXQGVAAYSGTNQNXIGLSXXCRMKX

SEQ ID NO: 368593 - protein, 76 aa, Zea mays
  Clone ID: MRT4577_99331C.1.pep
KRGEKKNFWGLLKRPRVKFWKNKTMGFLGKGFKKKKFPGKKGRGLGIYVGKRGSGKMGARFKFQGRFFSQIGKKFW

SEQ ID NO: 368594 - protein, 72 aa, Zea mays
  Clone ID: MRT4577_99332C.1.pep
NISLKLQFQALATGAREPKGGTEPFFIPGEEAKPLFSPFNSNRTRKFFFVVPPFEDRKNKPGETPVSHTVEH

SEQ ID NO: 368595 - protein, 62 aa, Zea mays
  Clone ID: MRT4577_99333C.1.pep
AFVMRLSSFNSPARSYSGPDQCSYIQYVVVFMAPLLGLTTTRIVCLLTSSYLSRCLVQACHI

SEQ ID NO: 368596 - protein, 78 aa, Zea mays
  unsure (1)..(78): unsure at all Xaa locations
  Clone ID: MRT4577_99334C.1.pep
RLHQSDISGAPSLVLFPDPHCKTIAQDAPVLYVKFALXLVTRYCEFSIQYRSILCNSFVGCIGIRTMERAPLFSVGSC

SEQ ID NO: 368597 - protein, 44 aa, Zea mays
  Clone ID: MRT4577_99335C.1.pep
ILVPILMALLPLRAHEGSGDMWWPCALPKGAHYDLMCVTLYADG

SEQ ID NO: 368598 - protein, 104 aa, Zea mays
  Clone ID: MRT4577_99336C.1.pep
MAEMRPIYREPGKPRRPPRSHGSGSFSVPLWEKKFCTDACAIPWAKLCETKRLMSLYKSVVDWDDSAALEAFNDAKARFCAVYHGQRYDIPLSDPNMFIDIVNP

SEQ ID NO: 368599 - protein, 62 aa, Zea mays
  Clone ID: MRT4577_99337C.1.pep
GRVSSVEIRRTLVKTVYLLVLSWEIQVKDIFTCSFSKEYNVITLCPTPPNNIEAGNEGGVSL

SEQ ID NO: 368600 - protein, 109 aa, Zea mays
  unsure (1)..(109): unsure at all Xaa locations
  Clone ID: MRT4577_99338C.1.pep
KTWETAFETKEDNCLAYFHIFTYADDTILFMDHDIDKARNLKLLLYAFEQLSXVTINFHESEIFXCFGEAHQSADXYTELFGCNLGSFPLNYLGLPVHFRRLSNTGWKR

SEQ ID NO: 368601 - protein, 59 aa, Zea mays
  Clone ID: MRT4577_99339C.1.pep
CVPTVAMTTFFFSAPCLVLASTIQRGQLHISSPPPTRDIVALVSPSPPCRRCKHYDVSL

SEQ ID NO: 368602 - protein, 80 aa, Zea mays
  Clone ID: MRT4577_9933C.1.pep
GKARTCIPLQDQVIRHTTWNLFDINVACSMLLKLYLRCMNIALVLWKQMQAEKKPNIVHFPHSTGFCYNQGLLADSNTLL

SEQ ID NO: 368603 - protein, 155 aa, Zea mays
  unsure (1)..(155): unsure at all Xaa locations
  Clone ID: MRT4577_99340C.1.pep
ILLSCKFLFSYYFEIKPLVXAGKEIMKINVNRYEWHEFFPQVKSNAGAILAVWAPIILVYFMDTQIWYSVFCTIFGGMCGIIHHLGEIRTMGMVRSRFYSLPEAFSMSLCPPATPIQRKGMFFSFLEKRIFKKIGKDERYYPRKFALVWNNIISS

SEQ ID NO: 368604 - protein, 113 aa, Zea mays
  Clone ID: MRT4577_99341C.1.pep
FIFLFFYGGGFFFFFWFFSKKKALFSIRQRGAQVPFPGKCPFLRETPADFKIRGEGRQNPKLKPVPNMGGTPTGRKNINGGQYAKKMPRPTFFRTKGGANLRPQGPNGFVTNL

SEQ ID NO: 368605 - protein, 332 aa, Zea mays
  Clone ID: MRT4577_99342C.1.pep
LRNNDLNQDDPISEVETEANDGDESKLPLQLAIVGRPNVGKSTLLNTLLQEQRVLVGPEAGLTRDSIRAQFQFDSRTVYLVDTAGWMERSGKEKGPASLSVVQSRKNLMRAHIVALVLDAEKIAKSKSSMNHPEIVIARQAIEEGRGLVVIVNKMDLLRDNQTLFNKVMDAVPREIQTVIPQVTGIPAVFVSALEGRGRIAVMRQVIDTYEKWCLRLSTSRLNRWLRKVMSRHSWKDSATQPKVKYFTQVKARPPTFVAFMSGKTQLSDTDIRFLTKSLKEDFDIGGIPIRIIQRSVPRKAYAKRNNTRNTGPRVVRMKTDKRTAVSDPALS

SEQ ID NO: 368606 - protein, 67 aa, Zea mays
  Clone ID: MRT4577_99343C.1.pep
SVQVWSGGDDVVGEPGRALWIGLPSQLDDQQAGGWIEKERHLARVPPISAARLLSEGTAGPGRPGGY

SEQ ID NO: 368607 - protein, 63 aa, Zea mays
  Clone ID: MRT4577_99344C.1.pep
MAGAWALIIDLAVFVPVLAARSASAGGGAAAVAEICMKTPYPDLCTRYGGGKPGATTPKGRCS

SEQ ID NO: 368608 - protein, 101 aa, Zea mays
  Clone ID: MRT4577_99345C.1.pep
MSKWEPVTFQESLSFVKKVKARDYMLYISLLDVLNRNDQIPLQAYSELSLLFQHHEDLLAELSKFRPLPCPNNVYTHGSIWMIIFLMPFLLLSLVLALRSH

SEQ ID NO: 368609 - protein, 90 aa, Zea mays
  Clone ID: MRT4577_99346C.1.pep
IRSNMAMTLTSRYSYGPAGFTHQDQRHLIMAPIPRLLETTTHLGPILSCLAEDADLVLQKHPRDTHGQLECRGHHLAGDIPWTTQGLEDS

SEQ ID NO: 368610 - protein, 154 aa, Zea mays
  unsure (1)..(154): unsure at all Xaa locations
  Clone ID: MRT4577_99347C.1.pep
PRVRLFARLNYRDRASMASACRAWRALGSSSCLWSTLDLRAHRYDREVASSLASRCGSLRRLRLRGHEAAEAVPALRAHGLREVVADGCRGLTDATLAVLAARHEDLQSLQIGPDPLERISSDALRHVALCCSQLRRLRLXGLREADADAVGAL

SEQ ID NO: 368611 - protein, 68 aa, Zea mays
  unsure (1)..(68): unsure at all Xaa locations
  Clone ID: MRT4577_99348C.1.pep
MPPKLDPSQVVEVFVRATASQRPAPSWRGPKIAPITHFPNKMAXEVSSETSADWTAMHTNVKHIDYNL

SEQ ID NO: 368612 - protein, 79 aa, Zea mays
  Clone ID: MRT4577_99349C.1.pep
SLHPRARQRLSFHAYTCAFVSAHRRHPSALHSPSFTVHCSRVVQTPHHGTCRPCCHGRCEPRRHQWRRHGCSTLRQAGP

SEQ ID NO: 368613 - protein, 58 aa, Zea mays
  Clone ID: MRT4577_9934C.1.pep
SPDTTSEPKGPGDGAEEDESNTGGRGPWPCENLTPLLVAGGVAVATIALILGVAFLAR

SEQ ID NO: 368614 - protein, 54 aa, Zea mays
  Clone ID: MRT4577_99350C.1.pep
FRLLLPLQIRRRFLRISAHSIRGSPNPNHSHGSRQPLLRLLTHTDHIRPLHPQQ

SEQ ID NO: 368615 - protein, 430 aa, Zea mays
  Clone ID: MRT4577_99351C.1.pep
MAILLRRASLRRVIAFAAASSSSSSLHSEIYKQGVCGSMFHCREFASKAKKKKSSGTDSDEESMSKKDLALHQAIDQITSAFGKGAIMWLGRSQGLRDVPVVSTGSFALDMALGTGGLPKGRVIEVYGPEASGKTTLALHVIAEAQKNGGYCAFVDAEHALDPALAESIGVDTNNLLVSQPDCAEQALSLVDTLIRSGSVDVVVVDSVAALVPKTELDGEMGDAHVALQARLMSQALRKLSHSLSLSQTVLLFINQIRAKVATFGFGGPTEVTSGGNALKFYASVRLNIRRIGFLKEGEETIGSQVAVKIVKNKHAPPFKTAQFELEFGKGICRSSELLGPFFFFFFVQKTGGAYYRFNDMSFKGKNNLKSYLTENKSVANDLETKLRRLMGTEAPKEQEAEDSSPSDLPEEVVTPEASSEEDMGVVIEA

SEQ ID NO: 368616 - protein, 146 aa, Zea mays
  Clone ID: MRT4577_99352C.1.pep
AGRSGRPTTSAVVPKKYTRADDPPFNPQLSEPVFATRSSRRSPPGHGLSSNYGHAVGHKDGRSRCEGRLRRGCVMQPSHHLQRKELGRRCRVWISEACSIGRVRLRCSYESSPMIASAAELHDAVCVCVGGVLCSVITSESSSPTL

SEQ ID NO: 368617 - protein, 426 aa, Zea mays
  unsure (1)..(426): unsure at all Xaa locations
  Clone ID: MRT4577_99353C.1.pep
MTTLLRRASLRRVIAAAAAASSFHPESYKQGICGSTFHCREFASKAKKKSSGTDSGEENMSKKDLALHQAIDQITSAFGKGAIMWLGRSQGHRDVPVVSTGSLDLDMALGTGGLPKGRVVEVYGPEASGKTTLXLHVIAEAQKNGGYCAFVDAEHALDPALAESIGVDTNNLLLSQPDCAEQALSLVDTLIRSGSVDVVVVDSVAALVPKTELDGEMGDAHIALQARLMSQALRKLSHSLSLSQTILLFINQIRAKVATFGFGGPTEVTSGGNALKFYASVRLNIRRIGLVKKGEETIGSQIAVKIVKNKHAPPFKTAQFELEFGKGICRSSELFELGLKHKLIRKSGGSYYSFNGKAFNGKSNLKSYLTENKSVANDLEMELKRLMGTDASKEQEAGDSSQSDLPEESVTPEASSEEDLGAIIEG

SEQ ID NO: 368618 - protein, 53 aa, Zea mays
  Clone ID: MRT4577_99354C.1.pep
IFKCDVIEISYQRILNSYMNLRLPTRTEGYQSGGQRLHTGRRSQANYSTKLTK

SEQ ID NO: 368619 - protein, 47 aa, Zea mays
  Clone ID: MRT4577_99355C.1.pep
TALLSCDTRRHCRHRSSTDDRMSPRHTHVTHLQSCATENLSMVRYVI

SEQ ID NO: 368620 - protein, 229 aa, Zea mays
  Clone ID: MRT4577_99356C.1.pep
MTSWLLSDKHNIVLKFPASDKASKMRNLDASLLPQTNKNVQQQSEVDVKLASMLYEALLSLREQIMEECNEGFNAYHIFKTDTLKEMSIRVPRTKEELLDINGLGKTKVKKYGDRLLATIEDFLSKHPNPRRNSGGGGGGNEHSDAAKKRRGSTAISAASYGDDDFDERTGQQSKKRAAKTRTVSAHGPRCTDADLDGPEVVEVDGELRSVRKPVAYGNGRVLPKWAPL

SEQ ID NO: 368621 - protein, 108 aa, Zea mays
  Clone ID: MRT4577_99357C.1.pep
GHAGTRPAPNGKTNAPASATSPNHSRARDRQNPPPAHQRRKASTTQCRPALPHIHNHPLTPASGAGRAGPNRRARGSPLGSETGSPAMPSPPPASYVLFKGKSRPRGA

SEQ ID NO: 368622 - protein, 90 aa, Zea mays
  Clone ID: MRT4577_99358C.1.pep
SKAPNELQELDVDDPRLRMNYKSMNTSIKHLGTFFGGKLASDCKCNLYCLLTCKGTTVKRPENLVTIDGPYFALDFFYEKRMYQLLCVQQ

SEQ ID NO: 368623 - protein, 438 aa, Zea mays
  unsure (1)..(438): unsure at all Xaa locations
  Clone ID: MRT4577_99359C.1.pep
MASLLLHRRHGAHPRAAAAACARLLRAFSALPDIDXRRPPPQAXSPAAPTSTSARASVLDLQLAVRAESDPARIHSLVASALSSHDMPRLHTSRQLFSLATSRLIRLRRADLAASLLDLLLASTPPSPGLLARALSLYPGPDDALRAFSSSPPAARSDVSLSALLSAFLRAGRLDDIKSTITLAESSHGVAPGRASHNVLLHALVKNSELAAARKLLDEMANKKLKHRPAPDIISYNTVLAGYSVQDDEDEFGKLLKEISLSNLEPNVVTYNCRIQWFSKKGETVKGEELLDVMESKGIAPNYVTYNALVQGYCKEGNVGAAMRVFKRMKVMKRREGRSDLGVSAHSQVYVVLFRSLVEKEKLDDALWICKSCFAMKAAPPFEAVKGLVEGLVKAGRSTEAKDVVAKMEFLVKGDAKLAWGKVVGELSFEEGSPNLNP

SEQ ID NO: 368624 - protein, 83 aa, Zea mays
  Clone ID: MRT4577_9935C.1.pep
LRLDCMIHFTQSHRLILLTTTGKVMNKLNLILPVLVVLLQPTLHAVICRPLQITSFSRLSAVAIDSMNEQIGIAKIHAIDATV

SEQ ID NO: 368625 - protein, 47 aa, Zea mays
  Clone ID: MRT4577_99360C.1.pep
FFYFQFVLFFWCQLFGTMLSPKLFFLGELWRTTHLSNARVFPELLLN

SEQ ID NO: 368626 - protein, 79 aa, Zea mays
  unsure (1)..(79): unsure at all Xaa locations
  Clone ID: MRT4577_99361C.1.pep
WITINLSICTYNSLMPFRFSLPPAFVVEGQAWCIGENFLPAIPGHGFEAASPHRVQGLHRFIPPLDLTYVRASNTXSAL

SEQ ID NO: 368627 - protein, 69 aa, Zea mays
  Clone ID: MRT4577_99362C.1.pep
AKTSHLSVMVEVFEVAPSIFMVELQRAAGDTSEYNTFVNNYCGKLDDIIWKFPTEKGKSRIPRLSKSHS

SEQ ID NO: 368628 - protein, 330 aa, Zea mays
  unsure (1)..(330): unsure at all Xaa locations
  Clone ID: MRT4577_99363C.1.pep
LERDLFHRLVHDLAQDPVPMRWVIAFWLWLESDGHHDFIRRVSALPGPVVLRFVEEAIECLRGLACRGHGPAAGTGDGDGDGRERRCLPCTNALLTKPIDDAGYFEGQREILDGVRYQYRTVCLAVCDVDSNITACVPTNTSGGVLVAPPMVGSPVLAVPTAASFPLNPMASPWIPLKSPPPDDYRSLFITFSRGYPISRDDIVEFFNSASTPCKIGLQEYVMSGLDSAIRRLPSRKYFVLRTCPDSGFYDIARSYIANXGWLLXYGPCVETVMIEKVAPGQLPVYGRMVLRSAAMIPAVLNGRQTAKFLIKGRHLWARVYVPSSRLSYA

SEQ ID NO: 368629 - protein, 75 aa, Zea mays
  Clone ID: MRT4577_99364C.1.pep
YPSSRPGRGCYHIKEGNSCNKPLFRVEETKHQVRKALSLELLYIVPKHCRYIARHGILGARGNDILFFQSIHVAE

SEQ ID NO: 368630 - protein, 81 aa, Zea mays
  Clone ID: MRT4577_99365C.1.pep
LPLNLSNCSSLVLKLDCPRLTTLQLLACTMLQEEELESAISLCCALEVLNVHSCPKINALDFGRLRLVYPSLKRIQSSLIS

SEQ ID NO: 368631 - protein, 86 aa, Zea mays
  unsure (1)..(86): unsure at all Xaa locations
  Clone ID: MRT4577_99366C.1.pep
ICFVAGGNKISVHVFFFCIRWKCTDGAICWFICINNLVWIKNKKKKKKKKKKKKKKKKKKKKKTXPQTQNLNPLPPRPNSFAPFKG

SEQ ID NO: 368632 - protein, 77 aa, Zea mays
  Clone ID: MRT4577_99367C.1.pep
ISWLTDFWFICTVSSCVRHFLFNYCAAPEYIYFFHTHQFSKFCSSLSAHKKNYSLPPLILMGCVSYTKACTVWRVHT

SEQ ID NO: 368633 - protein, 402 aa, Zea mays
  unsure (1)..(402): unsure at all Xaa locations
  Clone ID: MRT4577_99368C.1.pep
NLSIVELNSSSLSCLWLAGCXRSMTLLRLSCPNLQHVNLDGCDHLQSAAFCPVGLFSLNLGICPRGGGLHIEAPNMSILELKGCGVLSKASINCPRLTSLDASFCRQLVDDSLTCMSEACPLIEHLILSSCLSIGIDGLSSLHCLHKLTLLDLSYTFLINLKPIFDSCPQLKVLKLSACKYLSDSSLDALYREGALPLLVELDLSYSPIEQNAIEGLLACCSNLVNVNFNGCTNFQELVCESGDSGFVDMPVDSCPPSSPIKNEEISEQPGRLLEVLNCTGCPNIKKVVIPSIANFLHLSKINLNLSTNLKEVDLTCPNLLTLNLSNCSSLEVLKLDCPRLSNLQLLACIMLQEEELESAISLCSALEFLNVHSCPKINALDFGRLRLGCPSLKRIQSSLIS

SEQ ID NO: 368634 - protein, 54 aa, Zea mays
  Clone ID: MRT4577_99369C.1.pep
SQMAWGPPAHVTPSNCYGSLLQNISFCYFICSKFKLQADTNIGRKVFLLTTWHP

SEQ ID NO: 368635 - protein, 73 aa, Zea mays
  unsure (1)..(73): unsure at all Xaa locations
  Clone ID: MRT4577_9936C.1.pep
VTPSPAQXTGRLPVDAPGPGPPYMPAAGRKVFPLIPLVVHRALSLAACLKGAVRWLPRLPRHSFGSFEFSQVR

SEQ ID NO: 368636 - protein, 501 aa, Zea mays
  Clone ID: MRT4577_99370C.1.pep
MSSDCTSYPVIMPIHWHRWIACIASPAPRSGYSTGLATLSPSIEGGGAAEMVGGGGGGPLRRVGKYEVGRTIGEGTFAKVKFAQNTETGESVAMKVLDRSSILKNKMAEQIKREISIMKLVRHPNVVRLHEVLASRKKIFIILEFITGGELFDKIIRHGRLSEADARRYFQQLIDGVDFCHKKGVYHRDLKPENLLLDSQGNLKISDFGLSAWPAQGSFLLRTTCGTPNYVAPEVLSHKGYNGALADTWSCGVILYVLLAGYLPFDEVDLTTLYGKIESAEYSFPAWFSGGAKSLIRRILDPNPETRIRIEEIRSDEWFQKNYEPIKEIENEEVNLDDVNAAFDDPEDDNEDAFEDETGPLTLNAFDLIILSQGLNLAALFDRRQDCDKLQNRFLSRNPAKVILSSMEVVAQSMGFKTHIRNYKMRVEGLNADKTSHLSVMVEVFEVAPSIFMVELQRAAGDTSEYNTFVNNYCGKLDDIIWKFPTEKGKSRIPRLSKSHS

SEQ ID NO: 368637 - protein, 50 aa, Zea mays
  Clone ID: MRT4577_99371C.1.pep
GDSDEHIDFCNTLTTPVQCKNLWRQFKAETEYTVTQALAAQVSPHFHSTS

SEQ ID NO: 368638 - protein, 48 aa, Zea mays
  Clone ID: MRT4577_99372C.1.pep
ALFCRHECSRTSAYRSPRCAERFASTVIGYQILTVLSSLSLSISVPRF

SEQ ID NO: 368639 - protein, 113 aa, Zea mays
  Clone ID: MRT4577_99373C.1.pep
GSQCKGLIATMGTLHSTKNWWKAKEPWPGKKKKKKGKREEETQPAKGARGPQTKPNDRNHPWDLLLTYAGASLLASPRGGARGPRLISSRGLVGEKTYPLGFVDVVKTHDPGE

SEQ ID NO: 368640 - protein, 88 aa, Zea mays
  Clone ID: MRT4577_99374C.1.pep
PLETPGPSFRVFPRFSLPFWAGVSRFRFFKAPTLFFGFGNPGTFGRAKDFFKGPLPRFFGSPFGFRIPPWVVGFFSGVRIKVGLIGAF

SEQ ID NO: 368641 - protein, 56 aa, Zea mays
  Clone ID: MRT4577_99375C.1.pep
GKKDPFSFLDKLHGTGSVYTTGVDMMKSNSRTGGFFRPNSETFSWVAWPAPKSRVR

SEQ ID NO: 368642 - protein, 146 aa, Zea mays
  unsure (1)..(146): unsure at all Xaa locations
  Clone ID: MRT4577_99376C.1.pep
AFYVRATRAYIIPQXCIRYKGRYHQRELVXVTSMGADQRMSKHWXLQQAVDESAVEQXPVGHSQQQYIXAHLTIQTIXRSRXQALTHLAEVNPIHYLEQHVVASNAVAWAYVHGYXQEQQMQQFLPALSQLDMVNPIXYLQQEQPV

SEQ ID NO: 368643 - protein, 165 aa, Zea mays
  Clone ID: MRT4577_99377C.1.pep
IASGRPFFFFFFFFFFFFFIFLLFFFIKKNYATTKYKRKRKKKKKKKKKEKKKKKKKEKKKKKKKKKKKKKKKKKRGQEKKKKKKKHEKKKQKRKQRTEKLGWEEKKGEKVGLKKNKARRGNSKLGDGWIFLGDPRVRSGADGLEEPRGRTGASKGITLLKGHLN

SEQ ID NO: 368644 - protein, 59 aa, Zea mays
  Clone ID: MRT4577_99378C.1.pep
MPNASAPRVSADQLFTFWLSLLCAVAGPAAAQNCSCQPNVCCSKFGYCGTTDQYCSDGC

SEQ ID NO: 368645 - protein, 78 aa, Zea mays
  Clone ID: MRT4577_99379C.1.pep
RSGKQLENDPKFLKNGHPGMYNIIRVKPKVVETFSVYPPLGRCVERDIIQVVAVGVIQSLTIKELTGAKVGKAGGHNK

SEQ ID NO: 368646 - protein, 137 aa, Zea mays
  Clone ID: MRT4577_9937C.1.pep
MGLSHFALPCGEHYVEMRDFYKAVLAPLGYEFKFEAQGPTGAYYCAFGEKNKGPDFWLGGGGSSLKKYDGNMENRTCPVHFAFDAENPKHVDEWHEAAMKAGAVDNGKPGPRNYRPGYYAAFVLDPVGTNVEVLHLG

SEQ ID NO: 368647 - protein, 48 aa, Zea mays
  Clone ID: MRT4577_99380C.1.pep
SAESSATILRAKAALDSVQVYASMSSERLLNRMRSQQECRARQAVVNA

SEQ ID NO: 368648 - protein, 123 aa, Zea mays
  Clone ID: MRT4577_99381C.1.pep
YGDIFLVGIDPGDASKNKDVKKFPRVPPNPFEYSTPTWAGFSPDDPHAQWNILVKKNCSPRGAPTGTRTAGKNGTKPGPFASLKGGADWVLGFWIASFVVPSRYQVLGPFLKCSPPRKKPLGN

SEQ ID NO: 368649 - protein, 139 aa, Zea mays
  unsure (1)..(139): unsure at all Xaa locations
  Clone ID: MRT4577_99382C.1.pep
PAPAAEEAAEKATXHAPTASQATKSSPXXHXRPRGPPGAAAXTRRPRXTXKAXQPEKATXQAGQPXNGDPNXGSQETPGTPSPHAARNPXNHPAHRTAESPPXRGDEAGHAHGXPHEGPDAHTGPHRSTPEHGQDGAXG

SEQ ID NO: 368650 - protein, 76 aa, Zea mays
  Clone ID: MRT4577_99383C.1.pep
PSKRTFAPQFSSTRRPLTTFRTCPPARIGCSGPIFFPQFLLCFKFFLGPLSISVSTVRSFLSKFTHASLWDNPNYP

SEQ ID NO: 368651 - protein, 82 aa, Zea mays
  Clone ID: MRT4577_99384C.1.pep
FFHDSLARTPATGESGGGCASHAYRTSPCPFVSFHASTYELGPDLGVPLSAPAMDSLKTPPYPYLVCGCRSASRMWAERILR

SEQ ID NO: 368652 - protein, 100 aa, Zea mays
  unsure (1)..(100): unsure at all Xaa locations
  Clone ID: MRT4577_99385C.1.pep
MTTRFKKNRKNCGHVSAGHGRIGKHRKHPGGRGNAGGMHHHRILFDKYHPGYFGKVGMRYFHKLRNQFYCPAVXLSVSVLWSLFYNPTQEEIFSWFSPPP

SEQ ID NO: 368653 - protein, 105 aa, Zea mays
  Clone ID: MRT4577_99386C.1.pep
GANTHQRGGDRKKNKQKPSPGAPYGWGKTGRKNQQPKAQNWPSHHPQRGTGTSVTLENTIRNVLSRYLLPKGTKNRGGGWNCKGLPFVVVGGSFTSPKKAVREAC

SEQ ID NO: 368654 - protein, 226 aa, Zea mays
  Clone ID: MRT4577_99387C.1.pep
MGRSPCCEKAHTNKGAWTKEEDQRLVAYIKAHGEGCWRSLPKAAGLLRCGKSCRLRWINYLRPDLKRGNFTQEEDDVIIKLHQVLGNKWSLIAAQLPGRTDNEIKNYWNTHIKRKLIARGIDPRTHQPASAAAVAPAAAAAAAAQSSFRHHGDDEAVARRSCSRDSGCIAAHSSDDDDSTSGSLPHQHAVGGIDLNLSLSPPTSQPSSPAAAKGVVASGYGQGSES

SEQ ID NO: 368655 - protein, 45 aa, Zea mays
  Clone ID: MRT4577_99388C.1.pep
MAMSMLSEDYIIESDSLSDQGILKDHRVFHDAEHKVEVCSPFEYL

SEQ ID NO: 368656 - protein, 131 aa, Zea mays
  Clone ID: MRT4577_99389C.1.pep
FSACLVLEISVSRPSAHKRVLCARGFLEALVVVHAVVALILGESGLGYLLTYVITLRRKIREFKEENAISGFIACEGEPAPGAVYTPVLPNDIPTYAIDPLGREIPAWTIGGTKAKVDCVELLIHVVTSVV

SEQ ID NO: 368657 - protein, 214 aa, Zea mays
  Clone ID: MRT4577_9938C.1.pep
CFISYKKKKKKKKKKKKKKKKKKKKKKKKKKKKKKKKKKKARQKKRLVPWFLEKTEFFWPHRGREVWKRGIKVGWGLRWKGGKKHPCPGGKKPPREGPRFLLWAPEKKGRPQFLQGPGGSRGGPPRLHLGGKRKGHPRKRVIPWTDPRGWDFYLPTRGGGGNKKKRGQAGGQTKELGGGGKKKKNKILQLATPPGRLAANFGAREQPGATRRVG

SEQ ID NO: 368658 - protein, 50 aa, Zea mays
  Clone ID: MRT4577_99390C.1.pep
QETFPIQEILLLHLLNTITHRLTLCTFHKSTPYTSFELFLRAETSHILLK

SEQ ID NO: 368659 - protein, 78 aa, Zea mays
  Clone ID: MRT4577_99391C.1.pep
VPSPGSCQPEVTRPGPVNLIKRRLVVWGFWGFNLGPPRAVFPPPKLFHEPTSFFVRTNQWPGVGIRHQGFFLGWGPKS

SEQ ID NO: 368660 - protein, 138 aa, Zea mays
  Clone ID: MRT4577_99392C.1.pep
RERERVRKLMYYLTREATRIEIGTEEEEARTHASADAWEREEAERKANLDAIAEKQRLREIELEEKAKANREKLLKGSEAGAAPSSNKYIPKFKRQDGLPARQDAPPPRQDGPPPSTDRWRPSRYSSTSSSTWGRAHN

SEQ ID NO: 368661 - protein, 202 aa, Zea mays
  Clone ID: MRT4577_99393C.1.pep
MALALATTPLAHLALAPPSIFGSQSSLLLLPRRASPAPVSLSHRRIIAAVATKEPELGGGGSGAGDGAGGSGGGSDPRGGGQEGDGEEEKMGQGLSMSQKLTLAYAALVGAGGVMGYMKSGSQKSLAAGGISALVLYVVHTQLPVRPVLASSIGLGISAALLSVMGSRFKKSGKVFPAGVVSLVSLVMVGGYFHGILRSSHA

SEQ ID NO: 368662 - protein, 112 aa, Zea mays
  Clone ID: MRT4577_99394C.1.pep
RVKQRETCELSTLIPWRDLIASSCTSILTQRRAYSVAAAMAKEAARRADGNKAAAAVTMTKRVMGNKEVNTAAAAAEQKKAWLPDPVTGYYRPAGSPREVDAAELRAKLLTD

SEQ ID NO: 368663 - protein, 106 aa, Zea mays
  Clone ID: MRT4577_99395C.1.pep
SVMISCSCSVQAANFPRRFCHVQTSLLPLGLPWMPLCRCLPLHRCSKLHSRSPPCVPHRRHFHVSNLMRSLHRRRALLLCATVRDHVAPSGSSLISSPERILLLAT

SEQ ID NO: 368664 - protein, 53 aa, Zea mays
  Clone ID: MRT4577_99396C.1.pep
RTVVDSEGRTETTVTRHEADSSPRGDPESPRPPALDDAFSILDLFLGRWFRSR

SEQ ID NO: 368665 - protein, 186 aa, Zea mays
  unsure (1)..(186): unsure at all Xaa locations
  Clone ID: MRT4577_99397C.1.pep
CAVLLREKKETKYAAGRGLGLRQGNPXSPFQFVLTVDPFLTIFEHATERGXKLLTKLGGRQTRLQTXLYADDAPVVLSPTASDVAAFKEIIHRFGQVTNLNNSLIMPTRCSNIEVQEFLQTSGCPFKDLGLPLTLRRLKKVHCQPLDKAAGCLAHWQGRLLNHEGHITLGESPQPIYFLTALNPLM

SEQ ID NO: 368666 - protein, 91 aa, Zea mays
  Clone ID: MRT4577_99398C.1.pep
RMFSSPTCGIPLFTLRAFKAYVSPLNEAATLYPSIMSTLVQPASNPQHGGASLWENPREVPPNPPQVPPLSAQTKGRVGQAGQYGSGPGGS

SEQ ID NO: 368667 - protein, 193 aa, Zea mays
  Clone ID: MRT4577_99399C.1.pep
MDSEHWISRLAAAKRFYAAQLGHADRAGMDELDMDGDENAGRPDFACPYCYEDHDVASLVAHLEEDHPFEPHAAPCPICSEKVSKDMLNHITMQHGYLFKNRRRLRRFAVPGSQSLSLLSRDLREAHLQVLLGGGGHRSSNNNATNISADPLLSSFGLSFPTLDAEETSKLSTPAQSDVPVLKETAARVAVKY

SEQ ID NO: 368668 - protein, 81 aa, Zea mays
  Clone ID: MRT4577_9939C.1.pep
IRHEALVHCPGDTHNRTRHNRAMRDGRQSHGYEVMGRALGRRLSLDNAPEGTIGLPIDVGDGETTTCKVSNAAGIEYILTH

SEQ ID NO: 368669 - protein, 125 aa, Zea mays
  Clone ID: MRT4577_993C.1.pep
QKPSRFPMCGYQSHCTKNPSASLDMHSNPDLTKAIEIPFSIDRFGTRRNEVIEGGHKNERAEKCAPPRPSTPRPLPPPPGPPPSSPWPPSQSPTSIKEGIEVLVTCRDRKNRVMYPRAHQDPVLS

SEQ ID NO: 368670 - protein, 206 aa, Zea mays
  Clone ID: MRT4577_99400C.1.pep
MDSEHWISRLAAAKRFYAAQLGHAGADRAGMDELDMDGDENAGRPDFACPYCYEDHDVASLIAHLEEDHPFEPHAAPCPICSEKVSKDMLNHITMQHGYLFKNRRRLRRFAVSGSQSLSLLSRDLREAHLQVLLGGGGHRSSNNNAANISADPLLSSFGLSFPTLDAEETSKLSTPAQSDVPVLKEAAARPWRSSMDSLLQGKKGS

SEQ ID NO: 368671 - protein, 46 aa, Zea mays
  Clone ID: MRT4577_99401C.1.pep
LQRSTGVLTGQRSTQAAWNTCVKADITRLRSPTRAASRHTGYEGES

SEQ ID NO: 368672 - protein, 151 aa, Zea mays
  unsure (1)..(151): unsure at all Xaa locations
  Clone ID: MRT4577_99402C.1.pep
SGEGSWYPYCHPHYRYHYGYGCLRGCCCCLCLLLTLLVIFLVVVALAVVLVVKPREKHLELNQELEQDLLQDLLTTSPATVPAGAPYLSLYISLIFTVVNTDKXGIQVGTTDGDTMYXSCPIGVAVVPGVEHAVHKTRLIQSLVNDHRINE

SEQ ID NO: 368673 - protein, 32 aa, Zea mays
  Clone ID: MRT4577_99403C.1.pep
GVRATRPCAIVSVRASNAECRPASKLPAQRPA

SEQ ID NO: 368674 - protein, 151 aa, Zea mays
  unsure (1)..(151): unsure at all Xaa locations
  Clone ID: MRT4577_99404C.1.pep
PGGGPSHPPKKPGGETGWKRPPPPGIFQPPPLVPPRGGRPKGKNPPFGGVFSPQGKGAQWGGGNKPPGNPRRXPPQQLWVFTNHKPRGVKGFVFLREVNPGHVFVLMSILLSRVAPPKIGLKNRSPVFILRWVSAPKKTKKTQRKKKKKKK

SEQ ID NO: 368675 - protein, 50 aa, Zea mays
  Clone ID: MRT4577_99405C.1.pep
YNSHVHQVCCRASTVALLTQERPADGTHGEKEASGSSEKPTPPSNPPQIP

SEQ ID NO: 368676 - protein, 62 aa, Zea mays
  Clone ID: MRT4577_99406C.1.pep
KEMQNTAIFWLSRYELEMSAHILLHNTSPFWCCWHIPKCEKIVGRSVLDKCQKNWDQNPAVT

SEQ ID NO: 368677 - protein, 142 aa, Zea mays
  Clone ID: MRT4577_99407C.1.pep
MASDAAGAGATAAVAAAVLAILVVSSMGHPNKGPLCSECGSLCNTNCTAEAANSTTCRSYCDNDTTAAREDCERQVLQGCQAAYCSYGTCSRDCNLEAQNACLSIHDDYTDCQACKQGMFQSCFPTCQSNCNSTCVKKEHGC

SEQ ID NO: 368678 - protein, 109 aa, Zea mays
  Clone ID: MRT4577_99408C.1.pep
AYIFKLLNRAGVRMSIPFVSWANGPEETGFGFLWLCPWSLCDGNPKLVHLPLINSPKKLLAEVPIILRNSSENNHYLSVLRTFKRKRPPKVAPCGISSFFCNKLRSRNK

SEQ ID NO: 368679 - protein, 63 aa, Zea mays
  Clone ID: MRT4577_99409C.1.pep
SLTILIRLTCSCAYYYDPSGLVRDACAVRILLNDVGSPIVAVLLAAVCVIIRHQGGRLEQEDR

SEQ ID NO: 368680 - protein, 339 aa, Zea mays
  unsure (1)..(339): unsure at all Xaa locations
  Clone ID: MRT4577_9940C.1.pep
RTVGGRVGVAEEAVVPAPAREVVVGYALTSKKAKSFLQPKLRGLARKKGILFVAIDQKRPLSDQGPFDIVLHKLTGRGWQQLLEEYREAHPEVTVLDPPGAIANLLDRQSMLQEVSELDLTDXMFSSAGKVRVPKQLFVNTDPSSIPAAVRRAGLSLPLVAKPLVAKSHELSLAYDPTSLTKLEPPLVLQEFVNHGGVMFKVYIVGDAIRVVRRFSLPNVDEGDLSNNAGVFRFPRVSCAAASADDADLDPRVAELPPRPLLEILARELRRRLGLRLFNIDMIREHGTRDRFYVIDMNYFPGYGKMPGYEHVFTDFLLSLAKKEYKRRQSYSSLSSGEW

SEQ ID NO: 368681 - protein, 129 aa, Zea mays
  unsure (1)..(129): unsure at all Xaa locations
  Clone ID: MRT4577_99410C.1.pep
LVRGTGRHHVAPPFPPQFSFSQPYPPPXSHSHSGGGGGGGGGGGAGGGGGGVAKCHCDCSHHDHSPPRQPFFPPPQLPPPQIFLPAGPPLPPPGPLPFPPPIFFGPPPPPPPPPPFMCPRPPPCMYRRW

SEQ ID NO: 368682 - protein, 60 aa, Zea mays
  Clone ID: MRT4577_99411C.1.pep
PSHCLTPIITHKNHLKHASLSSKSQQIYILTSPPTTNTYIVENNTPYLDQSKMNTITHYR

SEQ ID NO: 368683 - protein, 134 aa, Zea mays
  unsure (1)..(134): unsure at all Xaa locations
  Clone ID: MRT4577_99412C.1.pep
WVTPLTIFXTRLRRAKXSESRTLTNGSLMPLDYADPLEAVYHSPEDVPEDNTYNNIYAMASNCTGKEAAESXRNECGSIDILEHSXLVMSTEATKXTIETSRIGYLXATSSASQHYICSQLQHSLAIMNTTKYL

SEQ ID NO: 368684 - protein, 96 aa, Zea mays
  Clone ID: MRT4577_99413C.1.pep
KLGRQLRFQNLIGLIVPNSFISYFCWAPRNESWYPPGGTHVVIGDPPLVWWWVYVVIMYLEGMGGLHKSITLSRQGRAPCFKCPLCLKIVMCEGVL

SEQ ID NO: 368685 - protein, 57 aa, Zea mays
  Clone ID: MRT4577_99414C.1.pep
DGRAWSGCALAAPPEPATGNHPRWCVAALLYHRPWLPQPEALMPIVSPELLASTRVH

SEQ ID NO: 368686 - protein, 81 aa, Zea mays
  Clone ID: MRT4577_99415C.1.pep
YRVPATCHRYHHTTVVHLISSFSIVNSLFYQAWTEDTLFHDKLMAWTELLLARNHLRWIIRATCSAPTNAGSPRRRSPMSA

SEQ ID NO: 368687 - protein, 66 aa, Zea mays
  Clone ID: MRT4577_99416C.1.pep
SGSSSSGTGSLAHQTKSYQESLNYSWPGRSLIPQCSSCLNKRMPLHSYDTNRGSEVGIGIRKYPRR

SEQ ID NO: 368688 - protein, 54 aa, Zea mays
  Clone ID: MRT4577_99417C.1.pep
IEIRGPYKRVIRLDGRGCKIGTLRMGVLFFVFYFFYFLPFLFFFFFFFNFKFFF

SEQ ID NO: 368689 - protein, 98 aa, Zea mays
  Clone ID: MRT4577_99418C.1.pep
PSIAKTFLTLLGSPRTRVSLEARALITPASLPLIYKSPPDWHAPGGLCSVPPVSWPLAQYFRLVNPRNVYRSCSIYVDHRLAIQFPSCIYPLISYHCT

SEQ ID NO: 368690 - protein, 48 aa, Zea mays
  Clone ID: MRT4577_99419C.1.pep
FFFGFLVIYPKAPCLQYFFLGQYPLSQTHIYCVRSFFSLYDQKIFLYN

SEQ ID NO: 368691 - protein, 356 aa, Zea mays
  unsure (1)..(356): unsure at all Xaa locations
  Clone ID: MRT4577_9941C.1.pep
FFLQPKLRGLARXKGILFVAIDQKRPLSDQGPFDIVLHKLTGKGWQQLLEEYREAHPEVAXLDPPGAIANLLDRQSMLQEVSELDLTDXWMVLRTFLKADFIIMVQFSSAGKVRVPKQLFINTDPSSIPAAVRRAGLSLPLVAKPLVAKSHELSLAYDPTSLTKLEPPLVLQEFVNHGGVMFKVYIVGDAIRVVRRFSLPNVDEGDLSNNAGVFRFPRVSCAAASADDADLDPGVAGARCLSIFFCPCRFFRCIRKHCRQLIFXMPLSELPPRPLLEILARELRRRLGLRLFNIDMIREHGTRDRFYVIDMNYFPGIQSDVLEHAQPTLFLVLVTSACNILDIIDLRISCLIQFSL

SEQ ID NO: 368692 - protein, 79 aa, Zea mays
  Clone ID: MRT4577_99420C.1.pep
YFIMIRNVFAHKLYETKKGGRGRKPEGMDVLIEPISEELAAAQIYQKITRHELLQKKLKEDEELLNKELNERGLHLWRS

SEQ ID NO: 368693 - protein, 109 aa, Zea mays
  Clone ID: MRT4577_99421C.1.pep
QKAAIRILLESVGGSGNLRDDVLVVGGDEEGGRGGCRRDQPIRCLRGLSMSFDEGMGAHVTGEGAGTGEAPGAELACVIRHVHRACAFRRSELGELSAGAQMVRRPTRP

SEQ ID NO: 368694 - protein, 101 aa, Zea mays
  unsure (1)..(101): unsure at all Xaa locations
  Clone ID: MRT4577_99422C.1.pep
GFVRCRLVVWPRLLFWLLCRFRSFWFPPPRGLGGLLSLLWVLLPGLSPPVGWLFARCCRLAAGFASGFLRPVLVRFVXXPVASXRXCLAXRGRARCRCXRP

SEQ ID NO: 368695 - protein, 68 aa, Zea mays
  Clone ID: MRT4577_99423C.1.pep
HDTNAAILSLTTIPKALILTDLKRGGHTTNVMTTLRDDCSTKGTCNSRFHARTNFTLYSTRSTGFPTS

SEQ ID NO: 368696 - protein, 89 aa, Zea mays
  Clone ID: MRT4577_99424C.1.pep
GSGPHQYLQVVGSFQSVPPGSSQSEFFAAGAEWAHHQDIIVKLNDIWQQFMLRRIKSTGFNTISSASSNWCCCLSLALGSERRTQPQLY

SEQ ID NO: 368697 - protein, 173 aa, Zea mays
  Clone ID: MRT4577_99425C.1.pep
GIRTQLGSREIAYACLPTHLPFSFLGAAAALVFSCMGAAYGTAKSGVGVASMGVMRPELVMKSIVPVVVAGVLGIYGLIIAVIISTGINPKAKPYYLFDGCAHLSSGLACGLAGLAAGMAIGIVGDAGVRANAQQPKLFVGMILILIFAEALALYGLIVGIILSSRAGQSRAD

SEQ ID NO: 368698 - protein, 92 aa, Zea mays
  unsure (1)..(92): unsure at all Xaa locations
  Clone ID: MRT4577_99426C.1.pep
GYTYVSLTAKNVADFISNIGKNYVAIISSLDSGKRRVIDASSXEEGAFPARSFFDVPLAITATSVASPLSLARGRHNXEERLQDEDTQAGFE

SEQ ID NO: 368699 - protein, 81 aa, Zea mays
  Clone ID: MRT4577_99427C.1.pep
IKRENNPVSQAQPPQDAILVSPTSQEFTVTNSHHHTLPLLSPESPMALPMPSPFSIPRPPILFSSSIPLRCPAASAPRCCD

SEQ ID NO: 368700 - protein, 72 aa, Zea mays
  Clone ID: MRT4577_99428C.1.pep
GYTYVSLTAKNVADFISNIGKNYVAIISSLDSGKRRVIDASSGERGAFPARFFFDVPLGITATSVASPLSLA

SEQ ID NO: 368701 - protein, 36 aa, Zea mays
  Clone ID: MRT4577_99429C.1.pep
WQCKSGWAGDHIVRMCSWLRPIRRARQTVDFPLSSV

SEQ ID NO: 368702 - protein, 107 aa, Zea mays
  Clone ID: MRT4577_9942C.1.pep
MAAAAEGLAAYRAVLRAARRTFAGDQLMLKESAVEIRRRFEDHRGLTPGSDDAARALADAREAAHFITHMIVQATRAPSGSFVVKPESVHAGATLEVPSEEILSKLK

SEQ ID NO: 368703 - protein, 58 aa, Zea mays
  Clone ID: MRT4577_99430C.1.pep
CQGVPHYISMVGAELQLAISTLWATILRIKCSDIDLLFHTSSHVIMHGCDAKISTSRT

SEQ ID NO: 368704 - protein, 103 aa, Zea mays
  unsure (1)..(103): unsure at all Xaa locations
  Clone ID: MRT4577_99431C.1.pep
VTCSSRRRRDPGAGGGAVAPTKAEGPVIGIDLGTTYSCVGVWEHDRVEIIANDXQGNRTTPSYVGFTDTERLIADAAKNQVAMNPINTVFDAKRLIGRPFSDA

SEQ ID NO: 368705 - protein, 97 aa, Zea mays
  Clone ID: MRT4577_99432C.1.pep
CPVPSSIIFLVLQKPWRGRPLPNSQVVPTVVNGGIMAFYFVLWGKGLLACGPLVYVSSSLSTVIFSRSCMVYGAVHLCQGISSSITTYVQCLNHAAS

SEQ ID NO: 368706 - protein, 191 aa, Zea mays
  Clone ID: MRT4577_99433C.1.pep
PACSSPSTSPSCPSLALAPLRTRLAAGRGGYLAGVRCCCQAAAPMAVVSSGISAVSEPGALLSFLAAILARNPRCDPRRTDEGVDREQGSNRARESSVRRGFLAKIISPSRRRNGFRRRGQIPRASHTILRLVVGDIRCISWDAPMTAPWSIWELGHRGFLAVAALPPPPAAHRGQLPWRHLCLRARTRVI

SEQ ID NO: 368707 - protein, 231 aa, Zea mays
  Clone ID: MRT4577_99434C.1.pep
RPGAGRFSAAHSSLSSPGDTLLPPPRCASLLPRRPCSHGTAPLSSHGRVSPAPVHLRASHRRVPRVPSFSTVSAAPPCVHLPWRLGVPARPPSCSRLWLPLLQLAGHARQLPNTISSSFHASARNPKCWVKTEPAAWCSPSARQKARTSRRASYSSTPSPPSREDTLVLATCHLLDKKEFHEYLVKSRNCVHRSSDVCDRRHQPKTGIMCNTPGVYIPLDNEYEFKHVISG

SEQ ID NO: 368708 - protein, 118 aa, Zea mays
  Clone ID: MRT4577_99435C.1.pep
MARTKQTARKSTGGKAPRKQLATKAARKSAPATGGVKKPHRFRPGTVALREIRKYQKSTELLIRKLPFQRLVREIAQDFKTDLRFQSSAVAALQEAAKRVTIMPKDIQLARRIRGERA

SEQ ID NO: 368709 - protein, 214 aa, Zea mays
  unsure (1)..(214): unsure at all Xaa locations
  Clone ID: MRT4577_99436C.1.pep
MVSFTAGLVAFATIMGVIAAPVDXRRRHXSKRSSPNSSGTNNGFYYQFWTDGQRGTATYTNKAAGGYSVTWSGISDMTSGKGWKSAQPRNITFTGNVKAQGNFYLAVYTWSQHGENYILEDYGSYNPCSQGKTVGTITSDGSQYQICTVDRGNNYIQNWSIRQNKRSSGTVTTANHYNAYAAHGLNHNPLSEAAYQIVSTEGFGSSGSADITVS

SEQ ID NO: 368710 - protein, 136 aa, Zea mays
  Clone ID: MRT4577_99437C.1.pep
MARTKQTARKSTGGKAPRKQLATKAARKSAPATGGVKKPHRFRPGTVALREIRKYQKSTELLIRKLPFQRLVREIAQDFKTDLRFQSSAVAALQEAAEAYLVGLFEDTNLCARRAARCCSVTRSRWWHSFRGFLIL

SEQ ID NO: 368711 - protein, 135 aa, Zea mays
  Clone ID: MRT4577_99438C.1.pep
MARTKQTARKSTGGKAPRKQLAKAARKSAPATGGVKKPHRFRPGTVALREIRKYQKSTELLIRKLPFQRLVREIAQDFKTDLRFQSSAVAALQEAAEAYLVGLFEDTNLCAIHAKRVTIMPKDIQLARRIRGERA

SEQ ID NO: 368712 - protein, 136 aa, Zea mays; identical to SEQ ID NO: 223521
  Clone ID: MRT4577_99439C.1.pep

SEQ ID NO: 368713 - protein, 106 aa, Zea mays
  unsure (1)..(106): unsure at all Xaa locations
  Clone ID: MRT4577_9943C.1.pep
KFQSLKNVTRGNFSCFTQXKNAQNTFSELLNMGVLPXAKENDTLAVAKIKFGDNDTLSAITTAMVKANNPFQITDVDXLXYTANPRHDPNAQPIEVVSEISPLEAD

SEQ ID NO: 368714 - protein, 69 aa, Zea mays
  Clone ID: MRT4577_99440C.1.pep
PLGFSVSGPQVRRPHSSYDYEQVLEIHITLPIAKRRPDCGFGVNTQLTPISITAEPSSRCRTLELLSPG

SEQ ID NO: 368715 - protein, 136 aa, Zea mays; identical to SEQ ID NO: 223521
  Clone ID: MRT4577_99441C.1.pep

SEQ ID NO: 368716 - protein, 89 aa, Zea mays
  unsure (1)..(89): unsure at all Xaa locations
  Clone ID: MRT4577_99442C.1.pep
SAHGGTTYCGYSIPHXRRWHIVACNGLRAVMWIWVFHTAKQDRAXLLGLRHPWDGHDDHSHGHGHRHEASSSASSHLVPYWLLTILCMF

SEQ ID NO: 368717 - protein, 84 aa, Zea mays
  unsure (1)..(84): unsure at all Xaa locations
  Clone ID: MRT4577_99443C.1.pep
MPNELTLDYVNISAFSLPAIRTKELIALIGSRHYIMLFLEMSHIAMPYIRPAISKVSCAAHYFXVXMIEKRIGLIFSGIRQSLC

SEQ ID NO: 368718 - protein, 44 aa, Zea mays
  Clone ID: MRT4577_99444C.1.pep
RPTHTTGPIPSHYHPSFFPPNPSLSADPIQINTNNPTLPSPNLT

SEQ ID NO: 368719 - protein, 69 aa, Zea mays
  Clone ID: MRT4577_99445C.1.pep
IDILYTTQSTFIILWHAYSKLPTGLWNAGISPSRTNFHGNQKAIDELKMEPDIWYRQHMLRPFVGQSGR

SEQ ID NO: 368720 - protein, 57 aa, Zea mays
  Clone ID: MRT4577_99446C.1.pep
KNRIYQLFFYNKGHSNPPDFFTDTFLPKKNTRTFLGIKLTTPNLLKRKPCHLKHAQT

SEQ ID NO: 368721 - protein, 91 aa, Zea mays
  Clone ID: MRT4577_99447C.1.pep
MGLDTSCGTGGGGGLLVAVATSAEELGCNYHVPAPEVHCISQAVILMDCIDYPLNVMMERRPEPDSCGKTNSRQASPLILALHLLHRRLQL

SEQ ID NO: 368722 - protein, 94 aa, Zea mays
  unsure (1)..(94): unsure at all Xaa locations
  Clone ID: MRT4577_99448C.1.pep
ALLALLALLVSATHPYIIPQRXLAHSAIIPQVLPPVTXMGLEHTDVQAYRLQLELAASVLQQPICQMQQQCLAHLNLQTIRTQQQQQLVTSLSH

SEQ ID NO: 368723 - protein, 121 aa, Zea mays
  Clone ID: MRT4577_99449C.1.pep
HLSSAARARGPRTLPRGWREPPAGGARGPLPTVSARGCGCGGRSRGRALRGRGAARGGSEGSRAGTLLPGAPGDDSGLLRAREEAAGEAATGRLRAPPGSGRLGRSASLRHWPAGSHLGPT

SEQ ID NO: 368724 - protein, 191 aa, Zea mays
  Clone ID: MRT4577_9944C.1.pep
ALTLAKSGGGRDEPRSTRGSSSLASALRDATAAEPSPSVKSWIGAPDGFDPCRELVRAAGDVRKVVPGRILSLRILPLSDRTVVVAGNVHGHIGFWDVDRLVEDEDGDGVDGVFEYFPHRGSVGGIVMHPAMLHKIYSSSYHGEICLMDVEKENFNTVYLCDYPIFSLCQAPNSPSSLYFAEGNELKLFDE

SEQ ID NO: 368725 - protein, 131 aa, Zea mays
  Clone ID: MRT4577_99450C.1.pep
MDGKQQQQPAAILVACLVLFTSINSSDAGGGGCSLSTIVVTQSGTGKWAHGMPVYSATVRNTCRCAQSDVKVDCKGFNTTLSVDPAKLKEIGGGVCLINGGAPLAPGQGVTFSYAWSTQFGFRPVSSTVTC

SEQ ID NO: 368726 - protein, 76 aa, Zea mays
  Clone ID: MRT4577_99451C.1.pep
KGPLFPHGRLVLLFGVVFFLFWAPPPPFALKGVSKKKKKKKKKKKKKKKKKKKKKKKKKKKKKKKKKKKKKKNKQT

SEQ ID NO: 368727 - protein, 83 aa, Zea mays
  unsure (1)..(83): unsure at all Xaa locations
  Clone ID: MRT4577_99452C.1.pep
KNPSITHLNHLASHPPFTTIHTNYHVLTYLPSQQLHTLNCXCDSHCTLALITLAIVVTLNLTIPLSISLSTHPFLFFPSFLLT

SEQ ID NO: 368728 - protein, 162 aa, Zea mays
  Clone ID: MRT4577_99453C.1.pep
PRFCRRRAGAVRRDPVLLRCGGAAAERGQPVLLVLPTATAAAAAVVGQLGLLVVLLHHRRERELRHARGPAHRVLAVPLPLPHHISFTASSKQRNKRTYDKKTELTQGCGAVVMLRRSQEEAPAMEMQARALFSPCVSLVPACGVEDRTGERKREVVGARAE

SEQ ID NO: 368729 - protein, 74 aa, Zea mays
  Clone ID: MRT4577_99454C.1.pep
GVGFLPFFFLRGKGPFFFWGGWFPNNKVSRFSPFFFKRRPGYPLVLGPWNLLRVLSLRSLVWYSAYGNGAPTIG

SEQ ID NO: 368730 - protein, 70 aa, Zea mays
  unsure (1)..(70): unsure at all Xaa locations
  Clone ID: MRT4577_99455C.1.pep
AQGSGHDHERGLGAELHIRDRVELRCGCTVRVLFFLGCAFVFFFFFFFFFFFFFFXPRVRPRVRLVLDRR

SEQ ID NO: 368731 - protein, 94 aa, Zea mays
  Clone ID: MRT4577_99456C.1.pep
GGSPGLGDFGLGQRVTAVQEPIGYGVVAGGFITLAPMLLFNSMWGPAPRASSLCAFFGLGVLVGLVKVRELDGQERVIPGTALALSFCRSICLG

SEQ ID NO: 368732 - protein, 73 aa, Zea mays
  Clone ID: MRT4577_99457C.1.pep
MRLLVERRTGKPERASETMECTALSVFKLASVVLALYAIVTKGAMLVIVYVVTLLEALMYKLMKCTPSPPKRR

SEQ ID NO: 368733 - protein, 70 aa, Zea mays
  Clone ID: MRT4577_99458C.1.pep
EKKIFFKKKKKKKKKKKKKKKKKKKKKKKKKKKKKKKKKKKKKKRGGRFKGPNFTSPFLQGNSFFLGAPN

SEQ ID NO: 368734 - protein, 65 aa, Zea mays
  Clone ID: MRT4577_99459C.1.pep
RSTTEYFFLMMTGVEMCDLCGLLHLAYHCMKHWSFFKMCVHTSFGRWVVFFWLFSETPTGAKFVI

SEQ ID NO: 368735 - protein, 50 aa, Zea mays
  Clone ID: MRT4577_9945C.1.pep
RAIHQFRAAPTLTYYIHETLHLLKSPASESSSLKCTATTNASLPITRGRA

SEQ ID NO: 368736 - protein, 313 aa, Zea mays
  unsure (1)..(313): unsure at all Xaa locations
  Clone ID: MRT4577_99460C.1.pep
MAGTHKKRMEDRFGSFFSFDEDSESEDISLDELEEELKEHKNCDVLVTILTNGEKQRGMATLVEGDLGHTEEALIQTHICSISSEIRSLQEKSWDISLKLKNRKLVETKLAGFVEEIVAPPGLVNILVNGEFLLXVNEGYARSLEILSRKLKFVQVDPLINASKALNDIKQELERLRQKALSKISSHIMEIFFAMRNPGTNIQILQQNLLQKHRYLVLFLKEHGSETYGDLCASYVDTMNKVLSTYFHVYVEALEKLKLEIGVPSDFNGHDTSIIDIIIRGREHLRNHGFMFSLGERANILKEIHQPXLVPHI

SEQ ID NO: 368737 - protein, 153 aa, Zea mays
  Clone ID: MRT4577_99461C.1.pep
IKNCSISNFSGVVHYNVVTFVSLNAARFQPLLMRSTSCKQWALCGWPAAAHSDPAPSLRIMVVDHPLVVTQHPCLPPWPHLLLVGVLFLCVTFPSTCTGARPPLASAAATPQIQLPHVLVVGAVLRHLRRRRLPLVWHAGREGGRGRGRRWGV

SEQ ID NO: 368738 - protein, 118 aa, Zea mays
  Clone ID: MRT4577_99462C.1.pep
LCIFFEIPKLMLLKESAMELWFLRRRLVVRAPNPWCQLSPCQNHSKMREGGEEERGEGRSGAGGASAARERERGAEGSEELRWRKGLATTRRSDTGVPRGLWRRWTEERGTGDGVPAG

SEQ ID NO: 368739 - protein, 126 aa, Zea mays
  Clone ID: MRT4577_99463C.1.pep
PAGQLRIRSSPALPRPGEPLRATCVPLPFLRSTATCCPRMALPAPAKRPSSRSPGGCTPQRLSTQIRTIPANRRTPYLPCNFSSSPASRLGTAFSLHFTSVSRPPDHNSSSASRRRLRLMQGVMRS

SEQ ID NO: 368740 - protein, 88 aa, Zea mays
  unsure (1)..(88): unsure at all Xaa locations
  Clone ID: MRT4577_99464C.1.pep
KLLSRSSLKRTIRLKSPRNSQEKPLSSSRLVEVVSIATTAQAKMKLWKETSRSSKTTTSSRCGLAATPSRLPXKAAVIYVSFPHFDLL

SEQ ID NO: 368741 - protein, 75 aa, Zea mays
  unsure (1)..(75): unsure at all Xaa locations
  Clone ID: MRT4577_99465C.1.pep
QQETVANFRXVGLKLNPEKCVFGAKKGKFLGCLVSTKGIEANPNKIEAILRMEPPNTKKGAQXLTGRLASLNRFI

SEQ ID NO: 368742 - protein, 307 aa, Zea mays
  Clone ID: MRT4577_99466C.1.pep
LPSQSENGCESSVIGRVSNFVTRAIAAYPSATWRACSCVHTLLHAPNFSLGAQDTRKTIAESFAQAAFSRFKSVSDSPAGLWKPLLLAISSCYICYPDAIEQVLNNVDGNGFAIWASALAQVSSSLFNPGLSSESEIKLAVLTLSTVINHLVSLSTGGTKLLHDCYASLMESCIQLKEVQDDGDNEDDDDGAEDVDDNDEEEDTEDDDEDSDDEDDAREETEEEFLERYALAAAAGESVEEGDIDEETQDIELGSLDDVDIQQVVIPLMQKLPALQPQPGAFPDSLVERIAETFPEYEQFLQALRRA

SEQ ID NO: 368743 - protein, 51 aa, Zea mays
  Clone ID: MRT4577_99467C.1.pep
VAVLGSAAPWWAPFAVLLRLWLWSSSLSSVRSSLACCVVVPLCAWCPGFPI

SEQ ID NO: 368744 - protein, 117 aa, Zea mays
  Clone ID: MRT4577_99468C.1.pep
YISFITLCRGCALYPQAVIPSLARACKTLIHSRGEWPGIHYEAFTKIPRGCSHPLGFLNAPHSSPRGEPKLGRASRIHRAPLTARRLSELHPGSSNYSAKGTPFHPHGCTVFPGGHP

SEQ ID NO: 368745 - protein, 44 aa, Zea mays
  Clone ID: MRT4577_99469C.1.pep
VLLLAFMEVTGEEGTRAAVEFCRTCVWLLYCQGVSPFYICHCTP

SEQ ID NO: 368746 - protein, 183 aa, Zea mays
  Clone ID: MRT4577_9946C.1.pep
ERHTGGSRTNDFSISYASVAALDDHICAFGGEEKKGILCSFEKYGMDSLNGNVLSLGCFSQYIKVHINMLEKMPVWSKPIPIVDNKEFIFPVVLIIRPWDPGIITAPTWGQVVFRGSGNVMTQMEPKRSPKAIKPSHQVISQLRPKHPLHRARSATQEGSQQIIKKKRKQRERKSTFFLLKLF

SEQ ID NO: 368747 - protein, 104 aa, Zea mays
  Clone ID: MRT4577_99470C.1.pep
KQLLDLSPHKASPLQPNRMLAEYVDVYSPLLYTPNPPPQVVSIATTAQEKMKLWKETSRSSKITTSSRCGLAATPSRLPVKAVLSTFLFRTLIYCKNYMDVSDV

SEQ ID NO: 368748 - protein, 49 aa, Zea mays
  Clone ID: MRT4577_99471C.1.pep
QQMWLVEDNTIPMHIRSGSTQVHRTSVELGLETLNQSQADANVELLPWS

SEQ ID NO: 368749 - protein, 67 aa, Zea mays
  Clone ID: MRT4577_99472C.1.pep
HHGGERILASNSTVFNGLFRALEPQRPSPRPGSESWPVLEGKPMANARKWLHRWSYRPRAPKNRSRP

SEQ ID NO: 368750 - protein, 62 aa, Zea mays
  Clone ID: MRT4577_99473C.1.pep
MQTRITSFTMGENDPVEEPEEFAGEAPEQQSFGGGCQHCNHCSGEDEAVEGDFQEFQDYDEF

SEQ ID NO: 368751 - protein, 71 aa, Zea mays
  Clone ID: MRT4577_99474C.1.pep
HTYIHKLLCYYTVPLQRTDTHLVRDEISKTAENSIHRRPQLQIHRRPQPKESRGSRDKRDDLIHRRPQLQI

SEQ ID NO: 368752 - protein, 81 aa, Zea mays
  unsure (1)..(81): unsure at all Xaa locations
  Clone ID: MRT4577_99475C.1.pep
QQETVANFRXVGLKLNPEKCVFGAKKGKFLGCLVSTKGIEADPNKIEAILRLKPPPTKKGAQXLSIXLASLNRFISRVDPQ

SEQ ID NO: 368753 - protein, 98 aa, Zea mays
  Clone ID: MRT4577_99476C.1.pep
SVKAAGVWTCGATNYVTLEITIIHRDYDAYIVKNLIDGLDNDNSTNKEIDEPEQHDHSKRQIMQKDLIYENITSKGSHRPQAAIEGNIRPEHYKDDLD

SEQ ID NO: 368754 - protein, 252 aa, Zea mays
  unsure (1)..(252): unsure at all Xaa locations
  Clone ID: MRT4577_99477C.1.pep
MEEEVAALVIDNGSGMCKAGFAGDDAPRAVFPSIVGRPRHHGIMIGMGQKDSYVGDEAQSKRGILTLRYPIEHGVVTNWDDMEKIWHHTFYNELRVAPEEHPVLLTEAPINPKSNREKMTQIVFETFNAPAFYVSIQAVLSLYASGRTTGIVLDSGDGVTHVVPIYEGFALPHAISRVDMAGRDLTDYLMKILAERGYTFSTTAEREIVRDIKEKLCYVALDFEQEIQTASQSSSLEKSYELPDXQVITLET

SEQ ID NO: 368755 - protein, 87 aa, Zea mays
  Clone ID: MRT4577_99478C.1.pep
NSTGVFIYKGCSSSFRIFSAASFKSLFTASSTASFVILITSRAPFRAGPASGSYGSGEGESSAISLSRSGGPTDFLPSYKAGRDSSS

SEQ ID NO: 368756 - protein, 88 aa, Zea mays
  Clone ID: MRT4577_99479C.1.pep
GLHSAEALHQLSVLVGGVTVRQLSAAGVHSHALGGNCSAASRLRPWDRRFPVKLAWGLFLIFGEKGLFWSLGGKKPPPPPQEPPSNRG

SEQ ID NO: 368757 - protein, 71 aa, Zea mays
  Clone ID: MRT4577_9947C.1.pep
GLLRLKRPPPWGGPFCRREGNTGAFGSGGLVTHPMGGVAFPEKIWRGWAPRRGVGPWGFGEALIGPPCPVS

SEQ ID NO: 368758 - protein, 99 aa, Zea mays
  Clone ID: MRT4577_99480C.1.pep
KVVHSNLLVLIPRTLCEDSDPLDVLVIMQEPVIPGCFLRAKAIGLMPMIDQGEADDKIIAVCADDPEYRHYNDIKELPPHRLAEIRRFFEDYKKRLISY

SEQ ID NO: 368759 - protein, 43 aa, Zea mays
  Clone ID: MRT4577_99481C.1.pep
VWPKPLFVPLGTFSDDDITQIVSTNLVASLVRSREPTRVVQYA

SEQ ID NO: 368760 - protein, 234 aa, Zea mays
  unsure (1)..(234): unsure at all Xaa locations
  Clone ID: MRT4577_99482C.1.pep
MERLISTPAASPTQTRIRGPLSLPSRLRCRPGAIALASPLRHEALSAAPEEARSQPPPPAAVGSLFPKACTAALFLLMTVVTSSLHSSLPAYASMQPVAKTXGGGGLFTTEILSSGWAGFLAGCLHTLSGPDHLVALAPLSIGRSRLESGLVGALWGCGHDAGQVIFGLLFLLLKDRWHIEVFRAWGTRVVGLTLLIIXAMGVREASEVQKSSLVLGGVDTSSMSSNEPLQPAS

SEQ ID NO: 368761 - protein, 356 aa, Zea mays
  Clone ID: MRT4577_99483C.1.pep
MERLISTPAASPTQTRIRGPLSLPSRLPAAAAWPRLRCRPGAIALASPLRHEALSAAPEEARSQPPPPAAVGSPWELLGSLLPKACTAALFLLMTLVTSSLHSSLPAYASMQPVAKTGGGGGLFTTEILSSGWAGFLAGCLHTLSGPDHLVALAPLSIGRSRLESGLVGALWGCGHDAGQVIFGLLFLLLKDRLHIEVFRAWGTRVVGLTLLIIGAMGVREASEVQESSLVLEGVDTSSMSSNEPLQPASAPRKKKVGFATFATGIVHGLQPDALLMVLPALALPSRFAGAAFLGMFLVGTVFSMGSYTAFVGSCSEALKEKVPRITEKLTWAASLVAIAMGVALLVGQFFGFSLY

SEQ ID NO: 368762 - protein, 49 aa, Zea mays
  unsure (1)..(49): unsure at all Xaa locations
  Clone ID: MRT4577_99485C.1.pep
TMXRXXXVXPPVKXKMXXRLVLCRLPFXHLLPXIXRHXVCHGKAXNLSN

SEQ ID NO: 368763 - protein, 72 aa, Zea mays
  Clone ID: MRT4577_99486C.1.pep
FFFFFFFFFFFFFFFFLFAGESNHVPIYSKKKGRKTTLRGPPSSTITGKEHDHGQEKKPKTLISKDRKQIPL

SEQ ID NO: 368764 - protein, 38 aa, Zea mays
  Clone ID: MRT4577_99487C.1.pep
LLRCLWPLITSFHSILIGLGAPCYYCAGILSRVIDGMT

SEQ ID NO: 368765 - protein, 103 aa, Zea mays
  Clone ID: MRT4577_99488C.1.pep
LGGRTLFFFFCGKEQACYQLVYAAYQRAWSSTLTTRPLPTGETPEEVRKGDSLEISRHGTSLCRSTSRLAQAPAPRAVSARTEASVPSCGQWGCDLEPDLEQS

SEQ ID NO: 368766 - protein, 113 aa, Zea mays
  Clone ID: MRT4577_99489C.1.pep
NHALHEWGTPCTKSHTKRIQQKGQSDDGTGPSAHRPNARKQETAERSMGRRLTTLSGFSNAKLGRALAHPIFHAHNLMQQNGFQSHVGQTLLRLGTLLNINLHKLGNMLLASG

SEQ ID NO: 368767 - protein, 104 aa, Zea mays
  Clone ID: MRT4577_9948C.1.pep
DGSTMTTFHASTRVLFHMRQAQMGTCVPIRPSLVLMTRTPARCCIDLIGARSIKYCPCCIVCICTCKLVCTFQIGQIHIIGCYPRCVEAIHNAYPPALVAKKRI

SEQ ID NO: 368768 - protein, 36 aa, Zea mays
  Clone ID: MRT4577_99490C.1.pep
LVKCSHAVLGALEPVNYETGAEWFHSTWLLNHTLRL

SEQ ID NO: 368769 - protein, 149 aa, Zea mays
  unsure (1)..(149): unsure at all Xaa locations
  Clone ID: MRT4577_99491C.1.pep
MKIFAVAIFAALVAVGSSASNDTSKKCFDGINMFCKDGNPDRIVHECRAIIPQYKVSGNHLINFANRQLEISYKYMLLAAQFKSYVKDRPGFHGKFKXSRHRSWXRXIGLIKYMTKRGGKMKFGNTNELTDGVSEVSELQAMATVLDTE

SEQ ID NO: 368770 - protein, 114 aa, Zea mays
  Clone ID: MRT4577_99492C.1.pep
AFGTPSISPQTIWVVAGVQIFFFTPMPRGVFPPFLCQVFLRLPPGWAGTLFGSFLPFKEQPSPPPLYPFSLFGLFLSGCPLPPFPNNGGPPPIIPQLNKKQSPSKQMIKNHIKK

SEQ ID NO: 368771 - protein, 44 aa, Zea mays
  Clone ID: MRT4577_99493C.1.pep
SRPRSLFVSVLRCFPACPLPGASGCFMSSLSAFSSRSRGSSGFP

SEQ ID NO: 368772 - protein, 45 aa, Zea mays
  Clone ID: MRT4577_99494C.1.pep
MALNIHTEEFISCPPARLHFTDSIYLASHRLYSLLKTISGITLPC

SEQ ID NO: 368773 - protein, 49 aa, Zea mays
  Clone ID: MRT4577_99495C.1.pep
GLPTRPCRSARLPSASPLAWRRSSPESKPTWIHHSLLVTSFFLTVASVL

SEQ ID NO: 368774 - protein, 97 aa, Zea mays
  Clone ID: MRT4577_99496C.1.pep
FNHSPQPRAAGEIRTSLSVILAEGEKVAPADSLAAVAAWVLLPWRLASEDGDRSTSHRGSDSHGFCSSEEKVRAGHYNHSFGKIRADNDITSERLHF

SEQ ID NO: 368775 - protein, 74 aa, Zea mays
  Clone ID: MRT4577_99497C.1.pep
QGCYVVLKRCKLYLSSGDVMVPVLWSTCNFSMRFKIVGMKSVRKLSRIGTPFCLEWVSGIKLELVKAFLTVWCG

SEQ ID NO: 368776 - protein, 102 aa, Zea mays
  Clone ID: MRT4577_99498C.1.pep
ALGGGGVSACGSPGSGCRLGRWSCGVSLCVCGGWWWVFVGSFRWVVSFWLWLSGPSAVGVGLCVSLAVWFCFSLSLVGWGWGPPACFFISPRWVLVAWGCMP

SEQ ID NO: 368777 - protein, 104 aa, Zea mays
  unsure (1)..(104): unsure at all Xaa locations
  Clone ID: MRT4577_99499C.1.pep
MGAAESVPETSIHEFTVKDCNGKEVSLETYKGKVLLVVNVASKXRYLSLTVGRICSWYSRGSGDAETVLMFSMPXGFTETNYTQLTELYQKYRDKGLFFACCGS

SEQ ID NO: 368778 - protein, 98 aa, Zea mays
  Clone ID: MRT4577_9949C.1.pep
ALAARPSAVPLAHGGAGSGGQTLVCRRAVRAKKVLQASGGQLRRRPTDDMFVVTLSLSSLPVCIHEVVVHHAQATQGGTGSQNRKRSEKQRREVTRWR

SEQ ID NO: 368779 - protein, 61 aa, Zea mays
  Clone ID: MRT4577_994C.1.pep
KTKKKNRAPFLTQQQLLPFYQQFGANPATLLKIQQLLPFVQLAFKKPKASYQKKIIGGALF

SEQ ID NO: 368780 - protein, 197 aa, Zea mays
  unsure (1)..(197): unsure at all Xaa locations
  Clone ID: MRT4577_99500C.1.pep
LEELSVKRLRGLAESEPISVSSPRLQSLSLKDLYNGQCFSCLITQSPNLKTLKIIRCAGNWDIVLQDVPRDSLLAELHLEKLQVSDWGVAALYGLEVLYLAKAPEVTDIGLAELAAKSPRLRKLHVDGWKANRIGDRGLAAVAQKCSXLQELVLIGVNLTSLSLELIATNCPTLERLALCGSDTFGDAEMSCVASKC

SEQ ID NO: 368781 - protein, 132 aa, Zea mays
  unsure (1)..(132): unsure at all Xaa locations
  Clone ID: MRT4577_99501C.1.pep
MVCLAADSFKAAAIKGLAGSCIFGRKLADARPCXRCMRRPRAAAVVAKYSDKSDYYDLCDISNATGQWDLYGSDAPSSYHPLQSKPFETFADPFTKRGLLLKFLLLGGXGSLLAYVSTYAIPDLLSIMKGPK

SEQ ID NO: 368782 - protein, 103 aa, Zea mays
  Clone ID: MRT4577_99502C.1.pep
LELPACSRTASARTGVTRQTTTLHNSFSTYGEVLESKIILDRDTQTTRGFRLVTLFTEEAMRNAIEGMIGKELDGRNITVNDAQSRGGRRGGRGSYGGRPRKR

SEQ ID NO: 368783 - protein, 94 aa, Zea mays
  unsure (1)..(94): unsure at all Xaa locations
  Clone ID: MRT4577_99503C.1.pep
LLCCVXFGPFAVSGSCAAVLVLLXLASRVSFLGFSXRFWRPRPXVXXCLVPLAVCRAGPRSFXVSALFWRGVSVFAPSXRXLLLCAVVXAPACS

SEQ ID NO: 368784 - protein, 69 aa, Zea mays
  Clone ID: MRT4577_99504C.1.pep
ELLQGLVDPFMPKNPGPTPLQVWPPLFPLDLFLPDQPESKPREIALIPDIYCSKQDLGTMKLKLSHFYI

SEQ ID NO: 368785 - protein, 70 aa, Zea mays
  Clone ID: MRT4577_99505C.1.pep
KGNGVFGKDIASTQLRWYYPLFAGIPLSLRLWYILHSCFICQRGESSYLRACISLKVSAFGDSCQRGRKY

SEQ ID NO: 368786 - protein, 85 aa, Zea mays
  Clone ID: MRT4577_99506C.1.pep
AQGLYEGHRRRRGRHRVGNHGPVHEGPDHLDDEKREGGGALGLHPPHHRHGHELHAQVLRIPADMARLIGSRRQGPDGFQILSAV

SEQ ID NO: 368787 - protein, 48 aa, Zea mays
  Clone ID: MRT4577_99507C.1.pep
VSVGFKPQPTPSDKCVAGLKGTKLGRVKYKCNTLVLILELWCFTVQSN

SEQ ID NO: 368788 - protein, 120 aa, Zea mays
  unsure (1)..(120): unsure at all Xaa locations
  Clone ID: MRT4577_99508C.1.pep
FKALALGAXGVFFERPXLFPPPVXGKARVKKALRILRDELKIPMALSGCASLKKITPDRVITERDKIRRSRKKASIPLLLCCAGLKICCCPATPVKIKTDRTTKLVLTFDQLANNVLGFP

SEQ ID NO: 368789 - protein, 1128 aa, Zea mays
  unsure (1)..(1128): unsure at all Xaa locations
  Clone ID: MRT4577_99509C.1.pep
IRHEVIVKAFLERLDWSSTSSASSQKDFILLAACEAHQTLPQSAEFPADVFTACLTTPIKMALHWFCKRTSLHGPLDRSLIDQIPGRQNDRKTLLGELNWIFTAITDTIAWNVLPRDLFQRLFRQDLLVASLFRNFLLAERIMRSANCSPVSYPLLPPTHQHHMWDAWDMAAEICLSKLPQLIADPNTEFQPSPFFMEQLMTFASGLDHGSKDKKPPELLPIVLQVLLSQPHRSRVLVLLGRFLDMGPWAVDLALSVGIFPCVLKLLQSSAMDIRQNLVFIWTKILSLDKSCQVELVKDGGHAYFIKFLDSLDAFPEQRAMAAFVIAVIVDGYRMGQEACMNAGLIDVCLRHLQPENPHDSQTEPLLLQWLCLCLGKLWEDFPDVQLLTLQTNTPEIVLCLLSEPQPEVRAAAVFALGTLLDTTSSNGADDDSDYDEKVKAEINVVRSLLQISSDASPLVRSEVAIALTRFALGHNKHLKSVASEYWKPQSNSLLKSLPSLANINNPNNVYSPNNILQGRIGPVLRVASDSGAAGRDGRMSTSSPIATSSIMHGSPESDDSSQLSDSGLLLRENASNGGPGYTRSRPVDNVIYSQFISTMCSFAKDPYPRIATIGRRALSLIGVEQVVMKNTRFNSGGAHRGETSASNFGMARSSSWLDMNSGNNLIKFRTPPVSPPQHDFLPGLRRVCSMEFGQHPISSPDGLAVPLLSSAAATSNAELSILPQSTIYNWSCGHFSRPLLIGSDDNEEANARRQERERLALDYLAKCKRSGMSTYTSXLGPKWFSPINIAWYWLLTGRWEWCLRGLIAHFWSERVLXIEVYPQISLHRQRSAXVLLNRXCHCTSKIAPNKXISRLTXVNRHXFRVVGGSAFLLLXACDDMRNQVWXRGCCLGKWGMXVGPVSSVQGHRAAGRSIVIDWQQQSGYLYASGDMSSILVWDLDKEQLLSTIQSTADTAISSLSTSQVRSGHFAAGFAAGSVRIYDIRSPDRVVYTARPHAPRTEKVVGIGFQPGFDPYKIVSASQAGDIQFLDVRRSAEPYLTIEAHRGSLTALAVHRHAPVVASGSAKQMIKVFSLEGEQLTIIRYQPSFMGQRIGTVNCLSFHPYKSLLSAGAGDNALVSIYAEENYK

SEQ ID NO: 368790 - protein, 87 aa, Zea mays
  Clone ID: MRT4577_9950C.1.pep
MKSVSVLFLCLALSTASAFEMHMPCPCAVLQGFYRAGPCLSTIMGACDLYPYAEYLKQSHYTQVAYDPYYSGCFQTSAMYHTLLLHC

SEQ ID NO: 368791 - protein, 435 aa, Zea mays
  unsure (1)..(435): unsure at all Xaa locations
  Clone ID: MRT4577_99510C.1.pep
FMTPPVSPPQHDYLLLGLRRVCSMEFGQHPINSPDGFANLLLSSATGPSNAELKKLPESTIYNWSCGHFSRPLLTASDDNEETNARREERERIALDFITKCQRSSCKITSQIASWDTRFELGTKAALLLPFSPIVVAADENEKXISVWNYDDAQPVNSFHNHKLSDRGLSKLLLINELDECLLLAASSDGNVRIWKNFACKGGQKLVTAFSSVQGHRAAGRSIVIDWQQQSCYLYASGDMSSILVWDLDKEQLLNTIPSSADSAISALSASQVRSGYFAAGFADGSVRIYDVCSPDRPVYVARPHAPRTEKVVGIGFQPGFDPYEIVSASQAGDIQFLDVRMAAEPYLTIEAHRGSLTALAVHRHAPVVASSAKQMIKVFSLEGEQLRIIRYLPSFMGQRTGSVNCLSFHPYKSLLAAGAGHNALVSIYAEENYK

SEQ ID NO: 368792 - protein, 245 aa, Zea mays
  unsure (1)..(245): unsure at all Xaa locations
  Clone ID: MRT4577_99511C.1.pep
MTSVQLETPHSGKYEQPTGLFINNEFVKGQEGKTFDVINPSDESVITQVHEATEKDVDIAVAAARKAFEGSWRQETPENRGKLLTNLANLFEKNIDLLAAVESLDNGKAISMAKVDISMCVGCLRYYGGWADKITGKVIDTTPDTFNYVKKEPIGVCXSDHSLELPXLLMWAWKIGPAIACGNTVVLKTAEQTPLGGLVAARLVKEAGFPPGVINVISGFGKVAGAALSSHMDVDKVAFTGSTVV

SEQ ID NO: 368793 - protein, 35 aa, Zea mays
  Clone ID: MRT4577_99512C.1.pep
NTTKEVIANDGISRYVTSKIKLHKTHIINFALLTY

SEQ ID NO: 368794 - protein, 129 aa, Zea mays
  Clone ID: MRT4577_99513C.1.pep
KKKKKKKKKKKKKKKKKKKKKKKKSFYLRPPPPWGLSFCIFPSPLVAGSFLGWGGALLGPCGGFFLKGRWPAFLQGCVTGKSPGVPHLFRLGTHPLFPLWRFGEEAPFDRLCKLFPSLIGEWSPPVAAL

SEQ ID NO: 368795 - protein, 107 aa, Zea mays
  Clone ID: MRT4577_99514C.1.pep
LRPVETVPAARRGESANARGLFDEMPTGKEGMEEPLPTDADHIGALPDTVLHHVLSFLPSQDAVRTCVLAKRWLDLWKSVTALRIGDRDMRKLWTVKGLQGFVDPFS

SEQ ID NO: 368796 - protein, 64 aa, Zea mays
  Clone ID: MRT4577_99515C.1.pep
HIFIIYIFILIWVLIIFSFSSSCPFNSKIFLFHFKVPTSNSIQIQKWSLGIHIFNKYSKSIMKQ

SEQ ID NO: 368797 - protein, 47 aa, Zea mays
  Clone ID: MRT4577_99516C.1.pep
GDDRRWGGIICTARSHPQHLHNLLGHYCWRCRRCWWAVEGKADLPAG

SEQ ID NO: 368798 - protein, 62 aa, Zea mays
  Clone ID: MRT4577_99517C.1.pep
WAVLCPGACDNNDEGTGIIPSLCCSECGSFSRPIIYDALVHLSSWLYPLTLTCFIKMVIMTI

SEQ ID NO: 368799 - protein, 882 aa, Zea mays
  Clone ID: MRT4577_99518C.1.pep
VYASRGSSWIIDSGCTNHMTWEKKMFTSYVKNKDSQDSIIFGDGNQGKIDLVQLVKQDKSETQGTLKRFLRRAQNEFELKVKKIRSDNGSEFKNLQVEEYLEEEGIKHEFSVPYTPQQNGVVERKNRTLIDMARTMLGEFKTPGRFWSEAVNTTCHAINRVYLHRLLKKTSYELLTGNKPNVSYFRVFGSKCYILVKKGRNSKFAPKAVEGFLLGYDSNTKAYRVFNKSSGLVEVSSDVVFDETNGSPREQVVDLDNVDEEDVPTTAIRTMAIGDVRPQEQKEQDQPSSSTMVQPPTQDDEQVHQEEACDQGGAQDDHVMEEEAHHAPPTQVRATIQRNHPVDQILGDISKGVTTRSRLVNFCEHYSFVSSIEPFRVEEALLDPDWVLAMQEELNNFKRNEVWTLVPRPKQNVVGTKWVFRNKQDEHGVVTRNKARLVAKGYAQVAGLDFEETFAPVARLESIRILLPYAAHHSFRLFQMDVKSAFLNGPIKEEVYVEQPPGFEDERYPDHVCKLSKALYGLKQAPRAWYECLRDFLIANAFKVGKADPTLFTNTCDGDLFVCQIYVDDIIFGSTNQKSCEEFSRVMTQKFEMSMMGELNYFLGFQVKQLKDDTFISQTKYTQDLLKRFGMKDAKPAKTPMGTDGHVDLNKGGKSVDQKAYRSMIGSLLYLCASRPDIMLSVCMCARFQFDPRECHLVVVKRILRYLVATPCFGIWYPKGSTFDLIGYSDSDYAGCKVDRKSTSGTCQFLGRSLVSWSSKKQTSVALSTAEAEYVAAGQCCAQLLWMRQTLWDFGYNLSKVPLLCDNESAIRMADNPVEHSCTKHIDIRHHFLRDHQQKGDIEVFYVSTENQLADIFTKLLDEKTFCRLRSELNVLDSRNLD

SEQ ID NO: 368800 - protein, 1675 aa, Zea mays
  unsure (1)..(1675): unsure at all Xaa locations
  Clone ID: MRT4577_99519C.1.pep
MDPRGKGTVVNDKEKESFVNEPKDDKPTDSSSGHKQRDGKKKKKTRRIKEIVYYDDNDESSSSQKDDDNVYENKKTINSNFSFDYSRIPQSTNAHLLSIPLASLCRDEYHKVSGLDNAKQIWDTLKISHEGNDVTILTKMELVEGELGRFAMIRGEEPTQTYNRLKTLVNKIRSYGSTRWTDHDVVRLMLRSFTVLDPHLMNNIRENXVHEDDARGDPWKVRXGWMMIKEARYVDDALNGPIQEPQTIALKATRSKEALPSKVAQVEAAGLNEEEMTLIIKRFKTTLKGRKEHPNKNKTKGKRSCFKCGKIGHFIANCPDNDSDQEKKSGKWEKKKNYKKAKGEAHLGKEWDSDCSSSDSDNEGLAATAFNKSSLFPNEHHTCLMAREKKVSTRNTSTYASSSEDESSDDDEIDYSCLFKGLDRTKVDKINELIDALNDKNMLLEKQENLLYEEHDKFVSAQSSLALEVKRNEMLSCELSTCHETISTLKGINDDLNAKLEVANKSNSCVEHVIICNRCKDFNVDACSEHLACISKLNDEVASLNAQLKTSKSEFDKLKFARDAYTIGRHPSIKDGLGFKREVKNLTSQKASISAKEKGKAPMASSAQKNHAFMYHDRRHSRNDYRSYNDFDSHAMVASSSSIMHDRNLARRNVINNMPRRNVVHVPRKTNSEPSTIYHALNASFAICRKDRKIIARKLGAKCKGDKTCIWVPKAICTNLVGPNMSWVYASGGSSWIIDSGCTNHMTGEKMMFSSYVKNKDPQDSIIFGDGNQGKVKGLGKIAISNEHSISNVFLVESLGYNLLSTLCSLSSRETGGKLSSCQKCDDNIKTPGVTSYGPLRTRRLSKXEEDKSETQGTLXRFLRRAQNEFELKVKKIRSDNGSEFKNLQVEEYLEEEGIKHEFSAPYAPQQNGVVERKNRTLIDMARTMLGAFKTLECFWSEAVNTACHAINRVYLHRLLKKTSYELLTGNKPNVSYFRVFGSKCYILVKKGRNFKFAPKAVEGFLLGYDSNTKAYRVFNKSSGLVEVSSDVVFDETNGSPREQVVDLDDVDEEDVPTTAMRTMAIGDVRPMEQKEQDQPSSSTMVHPPTQEDEQVHQEEACDQGGAQDDHVMEEETQPTPPTQVRAMIQRDHPVDQILGDISKGVTTRSHLVNFCEHYSFVSSIEPFRVEEALLDPDWVLAMQEELNNFKRNEVCTLVPRPKQNVVGTKWVFRNKQDEHGVVTRNKARLVAKGYAQVAGLDFEETFAPVARLESIRILLAYAAHHSFRLFQMDVKSAFLNGPIKEEVYVEQPPGFEDERYPDHVCKLSKALYGLKKAPRAWYECLRDFLIANAFKVGKVDPTLFTKTCDGDLFVCQIYVDDIIFGSTNQKSCEDFSRVMTQKFEMSMMGELSYFLGFQVRQLKDGTFISQTKYTQDLIKRFGMKDAKPAKTPMGTDGYTDLNKGGKSVDQKAYRSMIGSLLYLCASRPDIMLSVCMCARFQSDPRECHLVAVKRILRYLVATPCFGIWYPKGSTFDLIGYSDSDYAGCKVDRKSTSGTCQFLGRSLVSWSFKKQTSVALSTTEAEYVATGQCCAQLLWMRQTLRDFGYNLSKVPLLCDNESAIRMADNPVEHSRTKHIDIRHHFLRDHQQKGDIEVFHVSTENQLADIFTKPLDEKTFCRLRSELNVLDSRNLD

SEQ ID NO: 368801 - protein, 206 aa, Zea mays
  Clone ID: MRT4577_9951C.1.pep
MAAAACSSASPLLLPSGPRHASASRAWFLGGRSRALRSEAPCCCKAAAARGSAPQCGTVGGGSSSTRRGLLGVALGASALGLAAFDAVAAGLPPEEKPKLCDAACEGELENVAANYVAMVPTGQIFDSSLEKGQPYIFRVGSGQVIKGLDEGILSMKVGGLRRLYIPGPLAFPKGLTSAPGRPRVPPSSPVVFGVNLLYIPGLDDE

SEQ ID NO: 368802 - protein, 1650 aa, Zea mays
  Clone ID: MRT4577_99520C.1.pep
MDPKGKGMVVNDKEKESFVNDPKDDKPTDSGSGHKRKDGRKKKTRRIKEIVYYDSNESSSSQKDDDNDYKKKKTVNSNFSFDYSRIPQSSNAHLLSIPLGKPPHFDGEDYRFWSHKMRSHLFSLHPSIWEIVENGMHFDSTDSPMFINEQIHKNAQATTVLLASLCRDEYHKVSGLDNAKQIWDTLKISHEGNDVTMLTKMELVEGKLGRFAMIRGEEPTQMYNRLKTLVNKIRSYGSTRWTDHDVVRLMLRSFTVLDPHLVNNIRENPRYTKMTPEEILGKFVSGRMMIKEARYVDDALNGPIHEPQTVALKATRSKEALPSKVAQVEAAGLNDEEMTLIIKRFKTMLRGRKEHPNKTKTKAKRSCFKCGKIGHFIANCPDNDSDQEQGNKREKKKAYKKANGEAHLGKEWDSDCSSSDSDNEGLAATALQQVGPLPQRASHLPHGKGKEEHVVVCNRCKDFNVDACSKHLVSISKLNDEVASLNAQLKTSKSEFDKLKFARDAYTIGRHPSIKDGLGFKREVKNLTSHKASISAKEKGKAPMASSTQKNHAFMYHDRRHSRNAFRSYDAFDSHATIASSSSIMHDRNLARKNVVYHMPRRNIVHVPRKVMNEPSTIYYACNASFAICRKDKKIIDSGCTNHMTGEKRMFSSYVKNKDPQDSIIFGDGNQGKVKGLGKIAISSEHSISNVFLVESLGYNLLSVSQLCNMGYNYLFTNVDVSVFRRSDGSLAFKGVLDDKLYLVDFAKEEVGLDACLIAKTSMDWLWHRRLAHVGMKNLHKLLKGEHVIGLTNVTFEKVRPCAACQAGKQVGSSHHAKNVMTTSRPLELLHMDLFGPVAYLSIGGRTLKRFLSRAQNEFELKVKKIRSDNGSEFKNLQVEEYLEEEGIKHEFSAPYTPQQNGVVERKNRTLLDMARTMLGEFKTPERFWTEAVSTACHAINRVYLHRLLKKTSYELNCKCYILVKKGRNSKFAPKAVEGFLLGYDSNTKAYRVFNKSSGLVEVSRDIVFDETNGSPREQVVDLDDVDEEDVPMAAIRTMAIGDVRPQEQNEQDQPSSSTMVHPPTQDDEQVHQEEACDQGGAQDVHVIEEEAQPTPPTQVRATIQRNHPIDQILGDISKGVTTRSRLVNFCEHYSFVSSIEPFRVEEALLDPDWVLAMQEELYNFKRNEVWTLVPRPKQNVVGTKWVFRNKQDEHGMVTRNKARLVAKGYAQVAGLDFEETFAPVARLESIRILLAYAAHHSFRLFQMDVKSAFLNGPIKEEVYVEQPPGFKDERYPDHVCKLSKALYGLKQAPRAWYECLRDFLIANDFKVGKADPTLFTKTCNGDLFVCQIYVDVIIFGSTNQKSCEEFSRVMTQKFEMSMMGELSYFLGFQVKQLKDGTFISQTKYTQDLIKRFGMKDAKPAKTPMGTDGHTNLNKGGKSVDQKAYQSMIGSLLYLCASRLDIMLSVCMRARFQSDPRECHLVAVKRILRYLVATPCFGIWYPKGSTFNLIGYSDSDYAGCKVDRKSTSGTCQFLGRSLVSWSSKKQTSVALSTAEAEYVAAGQCCAQLLWIRQTLRDFGYNLSKVPLLCDNESVIHMADNPVEHSRTKHIDIRHHFLRDHQQKGDIEVFYVSTENQLADIFTKPLDESTFCRLRSELNVLDSRNLD

SEQ ID NO: 368803 - protein, 89 aa, Zea mays
  Clone ID: MRT4577_99521C.1.pep
YQALVTMQTECGGRLPMHDNEGMRWRCIEGHAIRPVGDQEREPCPVLTRKEVHLTYRMKEWLERSQKLLYVLNIHKTAHLTSHGDALEK

SEQ ID NO: 368804 - protein, 1453 aa, Zea mays
  unsure (1)..(1453): unsure at all Xaa locations
  Clone ID: MRT4577_99522C.1.pep
MDPKGKGIVINDKEKESFINEPKDDKPTDLGSSHKKKDGKKKRRIKKIVYYDSDESSSSQRDDDEKKKTVNSNFSFDYSRIPQNSNAHLFSIPLATTVLLASLCREEYHKVGGLDNAKQIWDTLKISHEGNDATMITKMELVEGELGRXHQDDARGNTRKVXSGRIMIKEARYVDEALNGPMPIHEPQTVALKATSSREALPSKVAQVEAAGLNEDEMALIIKRFKTALKGHKEHSIKSKTKGKRSCFKCXDQEQGKNGKRENKKVYKKAKGEAHLGKEXDSDCSSSDSDDEGLAATAFNKSSLFPNERHTCLMAKEKXRCKDFNVDACSEHLISISKLNDEVASLNAQLKTSKNDLDKLKFARDAYTIGRNPSIKDGLGFKREAKNLTSQGAPIFNKEKGKAPMISNSQKNHAFIYDRKFSRNAYHNRSCNAYDSNAMIASSSSFMHGTDMPRKNVIHHMPRRNVVHVPRKASNEPSTIYHACNASFAICRKNKKVIARKLGAKCKGYKTCIWVPKAIVTNLVGPNKSWVYASGGSSWIIDSGCTNHMTGEKKMFTSYVKNKDSQDSIIFGDGNQGKVKGLGKIAISSEHSISNVFLVESLGYNLLSVSQLCNMGYNCLFTNVDVSVFRRSDGSLAFKGVLDGKLYLVDFAKEEASLDACLIAKTSMGWLWHRRLAHVGMKNLHKLLKGEHVLGLTNDKSKTQGTLKRFLRRAQNEFELRVKKIRSDNGSEFKNLQVKEYLEEEGIKHEFSAPYAPQQNGVVERKNRTLIDMAKTMLGEFKTPERFWSEAVNTACHAINRVYLHRLLKKTSYELLTGNKPNVSYFRVFGSKCYILVKKGRNSKFAPKAVEGFLLGYDSNTKAYRVFNKSSGLVEVSSDVVFDETNGSPKEQVDLDDVDEEDVPTAAIRTMAIGDVRPQEQKEQDQPSSSTMVHPPTQDDGQAHQEEECDQGGAQDDHIMEEEAPQAPPTQVRATIQRNHPVDRILRDISKGITTRSRLANFWVEDALLDPDWVLAMQEELNNFKRNEVWTLVPRPKQNVVGTKWVFRNKQDEHGVVTRNKARLVAKGYAQVAGLDFEETFAPVARLESIRILLAYAAHHSFRLFQMDVKSAFLNGPIKEEVYVEQPPGFEDERYPDHVCKLSKALYGLKQAPRAWYECLRDFLIANAFKVGKADPTLFTKTCDGDLFVCQIYVDDIIFGSTNQKSCEEFSRVMTQKFEMSMMGELNYFLGFQVKQLKDGTFISQTKYTQDLIKRFGMKDAKPANTPMGTDGHVDLNKGGKSVDQKAYRSMIGSLLYFCASRPDIMLSVCMCARFQSDPRECHLVAVKRILRYLVATPCFGIWYPKGSTFDLIGYSDSDYAGCKVDRKSTSGTCQFLGRFLVSWSSKKQTSVALSTAEAEYVAAGQCCAQLLWMRQTLRDLGYNLIKVPLLCDXESAIRMADNPVEHSRTKHI

SEQ ID NO: 368805 - protein, 94 aa, Zea mays
  Clone ID: MRT4577_99524C.1.pep
TTSSRRSSRSRRSTRTSPSCSSRSAPRLSRSTTLRKRLGATRSGSTTTLAIWRRRAMPTSCSDSGRTAITDGRSRLVVPSYGTCNFGSGRSVDQ

SEQ ID NO: 368806 - protein, 1515 aa, Zea mays
  Clone ID: MRT4577_99525C.1.pep
MDPKGKGMVINDKEKESFVNEPKDNKPTDSGSSHKKKDGKKKRHIKKIVYYDDSDESSSSQKDDYEKKKTVNSNFSFDYSRIPQSSNAHFLSIPLGKPPHFDGEDYGFWSHKMRSHLFSLHPSIWEIVENGMQFDTSLCRDEYHKVSGLDNAKQIWDTLKISHEGNDVTMLTKMELVEGELGRFAMIRGEEPTQTYNRLKTLINKIRSYGSTRWTDHDVVRLMLRSFTILDPHLVNNIRENPRYTKMSPEEILGKFVSGRMMIKEARYVDDALNDPIHEPQTVALKATRSKEALPSKVAQVEAAGLNEEEMALIIKRFKTTLKGRKEHPNKNKTKGKRSCFKCGKIGHFIANCPDNDSDQEQEKKREKKKSYKKAKGEAHLGKEWDSDCSSSDSDNEGLAASAFNKTSLFPNEHHTCLMAKEKKGCLHGWYPSIKDGLGFKREAKNLTSHKAPIPAKEKGKAPMTNSVQKNHAFMYHDRRHSRDVHYNRSYNSLASHAMIASSSSNVYGRNMPRKNVAHAPRKVIAKKVGAKCKGDKTCIWVPKAIVTNLVGPNKSWVYASGGSSWIIDSGCTNHMTGEKKMFSSYVKNKDSQDSIIFGDGNQGKVKGLGKIAISSEHSISNVFLVESLGYNLLSVSQLCNMGYNRLFTNVDVSVFRRSDGSLAFKGVLDDKLYLVDFAKEEAGLDACLIAKTSMGWLWHRRLAHVGMKNLHKLLKGEHVIGLTNVTFEKDRPCAACQAGKQVGSSHHTKNVMTTSRPLELLHMDLFGPVAYLSIGGSKYGLVIVDDFSRFTWVFFLQDKSETQGTLKRFLRRAQNEFELKKNGVVERKNRTLIDMARTMLGEFKTPERFWSEAVNTACHAINRVYLHRLLKKTSYELLTGNKPNVSYFRVFGSKCYILVKKGRNSKFAPKAVEGFLLGYDSNIKAYRVFNKSSGLVEVSSDVVFDETNGSPREQVVDLDDVDEEDVPTAAIRTMAIGDVRPQEQKEQDQPSSSTMVHPPTQDDEQPFRVEEALLDPDWVLAMQEELNNFKRNEVWTLVPRPKQNVVGTKWVFRNKQDEHGVVTRNKARLVAKGYAQVAGLDFEETFAPMARLESIRILLAYAAHHSFRLFQMDVKSAFLNGPIKEEVYVEQPPGFEDEWYPDHVCKLSKALYGLKQAPRAWYECLRDFLIANAFKVGKADPTLFTKTCEGDLFVCQIYVDDIIFGSTNQKSCEEFSKVMAQKFEMSMMGELNYFLGFQVKQLKDGTFISQMKYMQDLLKRFGMKDAKPAKTPMGTDGHVDLNKGGKSVDQKAYRSMIGSLLYLCASRPDIMLSVCMCARFQSDPRECHLVAVKRILRYLVATLCLGIWYPKGSTFDLIGYSDSNYAGCKVNRKSTSGTCQFLGRSLVSWSSKKQTSVALSTAEAEYVAAGQCCAQLLWMRQTLRDFGYNLSKVPLLCDNESAIRMADNLVEHNRTKHIDIRHHFLRDHQQKGDIEVFYVSTENQLADIFTKPLDESTFCRLRSELNVLDSRNLD

SEQ ID NO: 368807 - protein, 47 aa, Zea mays
  Clone ID: MRT4577_99526C.1.pep
DTLPSVFSSMRLLQLLFRASPATLLLVLLPAVGGQQSSGQHSEDHNK

SEQ ID NO: 368808 - protein, 108 aa, Zea mays
  Clone ID: MRT4577_99527C.1.pep
PRSPFPKKGPLSKGRPPPPFFWGGNHHLRVPNPQGVFFPFCPPRPKRVWSLKAHYWPGFSPLFSPGVALPKLFFFGGQENKKWCLNPVSGIMAIKNLPLGQKILNFFF

SEQ ID NO: 368809 - protein, 1380 aa, Zea mays
  unsure (1)..(1380): unsure at all Xaa locations
  Clone ID: MRT4577_99528C.1.pep
DARGNTWKVXSGRMMIKEARYVDDALNGPIQEPQIIALKATRSKEALPSKVAQVEAAGFNDEEMALIIKRFKTALKGHKGHPNKNKTKGKHSCFKCVTXEQGNKREKKKAYKKAKGEAHLGKEWDSDCSSPDSDNEGLAATAFNKSSLFPXNEHHTCLMAREKEGLDRTKVDKINELIEALNDKNRLLEKQEDLLYEEHDKYVEAQKSLALEIKRNEMLSCELSTCHDSISSLKSINDDLYAKLEIANKSTSCVEHVTICNRCKDFNIDACSEHLASISKLNDEVASLNAQLKTSKSEFDKLKFARDAYTIGRHPSIKDGLGFKREVKNLTSHKASISTKEKGKAPMANSAKKNHAFNYKKFSRNIHHDRICNAYDSNAMFASSSSYMHGRDMPRRNVIHHMPRRNVAHVPRKINEPSTIYHACNASFAICRKDRKVIARKLGAKCKGDKTCIWVPKDIVTNLVGPNKSWVYASGGTSWIIDRGCTNHMTGEKKMFTSYVKNKDSQDSIIFGDGNQGKVKGLGKIAISSEHSISNEFLVESLGYNLLSVSQLCNMGYNCLFTNVDVSVFRRSDGSLAFKGVLDDKLYLVDFAKEEGGLDACLIAKTSMGWLWHRRLAHVGMKNLHRLLKGEHVIGLTNLVKQDKSETQGTLKRFLRRAQNEFELEVKKIRSDNGSEFKNLQVEEYLEEEGIKHEFSAPYTPQQNGVVERKNRTLIDMARTMLGEFKTPERFWSEAVNTACHAINRVYLHRLLKKTSYELLTGNKPNVSYFCVFGSKCYILVKRGRNSKFAPKAVEGFLLGYDSNTNAYRVFNKSSGLVEVSSDVVFDETNGSPREQVVDLDDVDGGDIPTAAIRTMAIGDVRPLEQKEQDQPSSSTMVHPPTQDDEQVPQVEACDQGGAQDVQVEEEEAPQAPPTQVRATIQRNHPVDQILGDISKGVTTRSRLVNFCEHYSFVSSIEPFRVEEALLDPDWVLAMQEELNNFKRNEVWTLVSRPKQNVVGTKWVFRNKHDEHGVVTRNKARLVAKGYAQVAGLDFEETFAPVARLESIRILLAYAAHHSFRLFQMDVKSAFLNGPIKEEVYVEQPPGFEDERYHDHLNYFLGFQVKQLKDGTFISQTKYTQDLLKRFGMKDAKPAKTPMGTDGHIDFNKGGKSVDQKAYRSMIGSLLYLCASRPDIMLSVCMCARFQSDPREYHLVAVKRILRYLVATPCFGIWYPKGSTFDLIGYSDSDYAGCKVDRKSTSGTCQFLGRSLVSWSSKKQTSVALSTAEAEYVAAGQCCAQLLWMRQTLRDFGYNLSKVPLLCDNESVIRIADNPVEHSRTKHIDIWHHFLRDHQQKGDIEVFYISTENQLADIFTKPLDEKTFCRLRSELNVLDSRNLD

SEQ ID NO: 368810 - protein, 760 aa, Zea mays
  Clone ID: MRT4577_99529C.1.pep
RFLRRAQNEFELKVKKIRSDNGSEFKNLQVEEYLEEEGIKHEFSVPYTPQQNGVVERKNRTLIDMARTMLGEFKTPGRFWSEAVNTTCHAINRVYLHRLLKKTSYELLTGNKPNVSYFRVFGSKCYILVKKGRNSKFAPKAVEGFLLGYDSNTKAYRVFNKSSGLVEVSSDVVFDETNGSPREQVVDLDNVDEEDVPTTAIRTMAIGDVRPQEQKEQDQPSSSTMVQPPTQDDEQVHQEEACDQGGAQDDHVMEEEAHHAPPTQVRATIQRNHPVDQILGDISKGVTTRSRLVNFCEHYSFVSSIEPFRVEEALLDPDWVLAMQEELNNFKRNEVWTLVPRPKQNVVGTKWVFRNKQDEHGVVTRNKARLVAKGYAQVAGLDFEETFAPVARLESIRILLPYAAHHSFRLFQMDVKSAFLNGPIKEEVYVEQPPGFEDERYPDHVCKLSKALYGLKQAPRAWYECLRDFLIANAFKVGKADPTLFTNTCDGDLFVCQIYVDDIIFGSTNQKSCEEFSRVMTQKFEMSMMGELNYFLGFQVKQLKDDTFISQTKYTQDLLKRFGMKDAKPAKTPMGTDGHVDLNKGVATPCFGIWYPKGSTFDLIGYSDSDYAGCKVDRKSTSGTCQFLGRSLVSWSSKKQTSVALSTAEAEYVAAGQCCAQLLWMRQTLWDFGYNLSKVPLLCDNESAIRMADNPVEHSCTKHIDIRHHFLRDHQQKGDIEVFYVSTENQLADIFTKLLDEKTFCRLRSELNVLDSRNLD

SEQ ID NO: 368811 - protein, 127 aa, Zea mays
  Clone ID: MRT4577_9952C.1.pep
GPEERDELYGMLTASVRAQLRARLRGAVPAADPGLAGQWCAALAGILEWLAPMAHATVRWQAERSLEQRGGSGNGSVLLLQTLQFAERDKVDAAVVELLVGLNYVWRFEKEMSCRAMLASPARPPVR

SEQ ID NO: 368812 - protein, 78 aa, Zea mays
  Clone ID: MRT4577_99530C.1.pep
SPQVAPSQEVAAKAHDSMEHVVSLDERRVSRTPPAPNNVNDRLPRWDSARLSKDHCSVRHSLSRYRAHGAYNVFFYQC

SEQ ID NO: 368813 - protein, 1064 aa, Zea mays
  Clone ID: MRT4577_99531C.1.pep
VYASGGSSWIIDSGCTNHMTGEKKMFTSYVKNKDSQDSIIFGDGNQGKVKGLGKIAISSEHSISNVFLVESLGYNLLSVSQLCNMGYNCLFTNVDVSVFRRSDGSLAFKGALDDKLYLVDFAKEEAGPDACLIAKTSMGWLWHRRLAHVGMKNLHKLLKGEHVLGLTNVNFEKDRPCAACQAGKQVGSTHHSKNVMTTSRPLELLHMDLFGPIAYLSIGGSKYSLVIVDDFSRFTWVFFLQNKTETQGTLKRFLRRAQNEFELKVKKIRSDNGAEFKNLQVEEYLEEEGIKHEFSAPYTPQQNGVVERKNRTLIDMARTMLGEFKTPERFWSEAVNTACHAINRVYHHRLLKKTSYEILTGNKPNVSYFRVFGSKCYILVKKGRNSKFAPKAVEGFLLGYDSNTKAYRVFNKSSGLVEVSSDVVFDETNGSPREQVVDLDDVNEEDVPTTAIHTMAIGDVRPQEQKEQDQPSSSTMVQPPTQDDEQPFRVEEALLDLDWVLAMQEELNNFKRNEVWTLVPRPKQNVGGTKWVFRNKQDEHGVVTRNKARLVAKGYAQVAGLDFEETFAPVARLESIRILLAYAAHHSFRLFQMDVKSAFLNGPIKEEVYVEQPPGFEDERYPDHVCKLSKALYGLKQAPSAWYECLRDFLIANAFKVGKADPTLFTKTCDGDLFVCQIYVDDIIFGSTNQKSCEEFSRVMTQKFEMSMMGELNYFLGFQVKQLKDGTFISQTKYTQDLIKRFEMKDAKPAKTPMGTDGHVDLNKGGKSVDQKAYRSMIGSLLYLCASRPDIMLSVCMCARFQSDPRECHLVAVKRILRYLVATPCFGIWYPKGSTFDLIGYSDSDYAGCKVDRKSTSGTCQFLGRSLVSWSSKKQTSVALSTAGAEYVAAGQCCAQLLWMRQTLRDFGYNLSKVPLLCDNESAICMAGNPVEHSRTKHIDIRHHFLRDHQQKGDIKLKILVRQWGLRAKNDPVLVLNAKGGEIKAKASKWISYHVLSEAKTSFRGRGLRSGEAELPVAPEAELGCCQSHPGGWHSSRSGASGAVNLSGRSVKGRSDCGHFDLAD

SEQ ID NO: 368814 - protein, 438 aa, Zea mays
  Clone ID: MRT4577_99532C.1.pep
MQEELNNFKRNEVWTLVPRPKQNVVGTKWVFRNKQDEHEVVTRNKARLVAKGYAQVVGLDFEETFAPMARLESIRILLAYAAHHSFRLFQMDVKSAFLNGPIKEEVYVEQPPGFEDERYPDHVCKLSKALYGLKQAPRAWYECLRDFLIANAFKVGKADPTLFTKTCDGDLFVCQIYVDDIIFGSTNQKSCEEFSRVMTQKFEMSMMGELSYFLGFQVRQLKDGTFISQTKYTQDLIKRFGMKEAKPAKTPMGTDGHTDLNKGVATPCFGIWYPKGSTFDLIGYSDSDYSGCKVDRKSTSGTCKFLGRSLVSWSSKKQTFVALSTAEAEYVAAGQCCAQLLWMKQTLRDFGYNLSKVSLLCDNESAIRMADNPVEHSRTKHIDIRHHFLRDHQQKGDIEVFHVSSENQQADIFTKPLDEQTFCKLRSELNVLDSRNLD

SEQ ID NO: 368815 - protein, 89 aa, Zea mays
  Clone ID: MRT4577_99533C.1.pep
SALLAPSVCSASITWRHCASGCPGCCPIRSASAPCPPSRSGCRALSIIHFVPVYRPAVSLGSRPSVAVQGSSTLIVLVNHAPRALGLRV

SEQ ID NO: 368816 - protein, 41 aa, Zea mays
  Clone ID: MRT4577_99534C.1.pep
ETKALNSYSEAIQNTLKLGYKAGMAKGLGIGCTYGIACMSW

SEQ ID NO: 368817 - protein, 979 aa, Zea mays
  Clone ID: MRT4577_99535C.1.pep
MDEGLKPKLSELRLKRRIFAISEGEISQDKKVAAETKLTEEEKRFEEKKVVYPYIAGFIESMAKTNTENITKEILEGLYEDTGDSDSYDAESGGEDSEDRPWRPSHAIFGKSTIKQSHLENMRGRYFRDMSIVGAGGDNNVPAPEEDEVVIYRSFFKAGLRFPLSRFVVEVLKIYQIFLHQITPEAIIRMAIFVWAVRSQGLEPSAKCFCSMHELAYETKAMGKEQYHNNFGCYGFTARPNASYPVPTYRKRWPGAWMEEWFYVKNDLKGREDINEVIMRPIWSRFGLRKPKVEIDKAAEACQKAFGTPQVMNCLSHNPRQKITHYPHPSRAKEKKRLNRVFDAIGFVYPDYCYPLRGRGKKRKTAASTTLDESAPKSKKLKVLTHRPRYIEPAVVPEFGGETSSATKPKEPISPTQKAEDPTKMPKVPLGEPAESKTDKDKAEEPKIEGTKMFEILSPSAEVTVPKAQKGFSATPKRRRMANVLDVLETVKALSSTPSEKIGEASKVQIEAETKPAKIEAAIIQASAEAEPSELAEKKPSEIEERAIEEKAIEQVSPEKVATPAPEALKESIDYIIRHALGKVLSKEEKREAQHYAQKLKYPKEALVFNGSEEDDFLYCLPDNKEISVKWEIGRSFGFPKLEDGLSVLSKDELADSLAYNSLKGLILSNALRAQKNIEDEGCTMALNNLRSEVIEPRNEGLEKDKILISLVNKIKEDEVSSKAQAETQKNEIEDLQKQLAEAKEKCVVAEANRDASEYWKKYLEKTVAELRASKERCFEKSMECVKKIKTSFANVGDYSNEDNFIRGDPEGVIEWISEEAEAFEEILSDREDVCAFSGARGVAAVLEKAGCDHVKTLAQAEAAFSVGDTKDPSTEANLIGGKFFPDIWENGSREMAHEIMKKSEKDIHDAREATKEAEKAAELERRIVELPPPPEPFDPLADPETKKAIEIINMAEAIVDEVVTKLFNEVAEKVLKED

SEQ ID NO: 368818 - protein, 115 aa, Zea mays
  Clone ID: MRT4577_99536C.1.pep
FLLSGRDSARSALLHFRWNWCALDTMKQLLNRQHTHAIRTSKSSFTKEEVKIETSGFPRSMILYGQCILNLNYMKRPTTRRDQPWRFPGVIAEERRQKRFHLIIWHLRNWQSMMW

SEQ ID NO: 368819 - protein, 165 aa, Zea mays
  unsure (1)..(165): unsure at all Xaa locations
  Clone ID: MRT4577_99537C.1.pep
IRHEAQIHGATGLKTPTAGPPSLHGALRAPAPPLLPPLVPPQHPQPPPAPPPLXPLPRPPPPRLRPPPLPPPVAIARPPAPALRGCRGGRPPTPPVPPQLRLPSRPRPRPXPHRPPPPQPRPXPPTKTTPLPPPPPPLPRPPHPRTAPXPRRPAPPGLGAARPPV

SEQ ID NO: 368820 - protein, 89 aa, Zea mays
  unsure (1)..(89): unsure at all Xaa locations
  Clone ID: MRT4577_99538C.1.pep
FPYVVRPSTMALNNLRSGVIELRNEGLEKDKILISLVNKIKEDEASSKAQAEAQKSEIEDLRRQLAEAKEKCVVAKANRDASXIFGKII

SEQ ID NO: 368821 - protein, 67 aa, Zea mays
  unsure (1)..(67): unsure at all Xaa locations
  Clone ID: MRT4577_99539C.1.pep
PTRLFTRAVVHAPTLVDIVMTCNRXHGIARRLTNTFTSALPHVHRYLSTMDNQPNFKKLIGEVKQSE

SEQ ID NO: 368822 - protein, 302 aa, Zea mays
  unsure (1)..(302): unsure at all Xaa locations
  Clone ID: MRT4577_9953C.1.pep
MAAAACSSASPLLLPSGPRHASASRAWFLGGRSRALRSEAPCCCKAAAARGSAPQCGTVGGGSSSTRRGLLGVALGASALGLAAFDAVAAGLPPEEKPKLCDAACEGELENVPMVTTESGLQYKDIKVGEGPSPPVGFQVAANYVAMVPTGQIFDRWDSDSXPDVQLEIWDFISTSFAKHNSTNYCLHNQLADLESVPVEFCCLLGLGGWKPFXSYCSSLLCXSSLEKGQPYIFRVGSGQVIKGLDEGILSMKVGGLRRLYIPGPLAFPKGLTSAPGRPRVPPSSPVVFDVNLLYIPGLDDE

SEQ ID NO: 368823 - protein, 44 aa, Zea mays
  Clone ID: MRT4577_99540C.1.pep
QLNPSGEFFFAQRLDNWDNISQVHKTLTYTIVGSHTHTHFSSIN

SEQ ID NO: 368824 - protein, 180 aa, Zea mays
  unsure (1)..(180): unsure at all Xaa locations
  Clone ID: MRT4577_99541C.1.pep
MRNLQSESVKDAISQIVGDAKEKKRKFTETGKFQIGLKNYDPQKDKGFRGSVKLPHIPRPKIKGGMFGDAHHVEEAEKMELDYLDVEVLKKMNKNKKFVKRFAKKNHVFLASKAIIKQIPRLLGPGLNKEGKFPTLVTHQKSLESKGNETKATVKFQFKKVLCMGXVAVANLAMEEKQIQ

SEQ ID NO: 368825 - protein, 75 aa, Zea mays
  Clone ID: MRT4577_99542C.1.pep
KYKKKKTIQIQKKKKKIITEIPGGKIQVRSSFPLSITPLLCFFFFGSSCPWHTHNVSLLKCYPLLRVQRNLPFHR

SEQ ID NO: 368826 - protein, 109 aa, Zea mays
  Clone ID: MRT4577_99543C.1.pep
CGLAWGTGGFTGTKFPSSLFWSDQQAPFCPCLPQNGPCVIGANGLPIQQRRRWFALPHGAPVLICSMPGLPHGRPIFPSNAGAPALPVVTICTPCAPTAPILMKVPFAP

SEQ ID NO: 368827 - protein, 70 aa, Zea mays
  Clone ID: MRT4577_99544C.1.pep
VWYRQGFFQFGSFKTGPTQLKLGNNLQMKLLSMCAYVVFGVIYRNTPYRVSLVLTFYLYILYGPPLAVYA

SEQ ID NO: 368828 - protein, 67 aa, Zea mays
  Clone ID: MRT4577_99545C.1.pep
VHPRRLHNTAPKVETTTSAYRAMTTDRAAFTDYYHRTCVGMIQQGLKPLLLQCFQQIVHHQLRRIQT

SEQ ID NO: 368829 - protein, 193 aa, Zea mays
  unsure (1)..(193): unsure at all Xaa locations
  Clone ID: MRT4577_99546C.1.pep
MATDEATKPSPIPPYPEMILAAIEGLDDKSGSNKSAISKYIEGKYGSLPPAHASLLTAHLARMKESGELVFLKNNYFRAGAPDAPPKRGRGRPPKARDPNAPAPAPKSPSSTGQLECCVGRXNYXAEAAVKQATAGMPKPRGRPPKKAKTDGAASPSPSPAPAPAGDGSTPGKRGRGRPPKVRPAVPSETAAA

SEQ ID NO: 368830 - protein, 104 aa, Zea mays
  Clone ID: MRT4577_99547C.1.pep
ASPVSLILRLFLRLDSDTRDCVSSGAGYVHCTCECRICLSCRAVNGSHNVKPALLNLTYSHARAVNGRKAKSPCPQSSEGSHIHLLSRSSWKPDLQTRRPCNVY

SEQ ID NO: 368831 - protein, 707 aa, Zea mays
  Clone ID: MRT4577_99548C.1.pep
RAFSECLLGALSGQTVVYVTHQIEFLPAADLILVMKDGKIAQAGKYNEILDSGDEFMELVGAHKDALAELDTIGAANRSNEGSPSRGTAKLTRSLSSAEKKDKQDEGNNQSGQLVQEEEREKGKVGFWVYWKYLTLAYKGALVPLVLLAQLLFQVLQIGSNYWMAWAAPVSKDVEPPVSMSTLIYVYIALAVGSSFCVLLRALFLVTASYKTATLLFDKMHMSIFRAAMSFFDSTPSGRILNRASTDQSEVDTGIAYQMGSVAFAVIQLVGIIAVMSQVAWQVFVVFIPVAATCFWYQRYYIDTAREMQRLVGVCKAPIIQHFAESITGSTTIRSFGKEDQFVSANSHLMDAYSRPKFYNAGAMEWLCFRLDVLSSLTFAFSLIFLINLPPGFIDPGIAGLAVTYGLNLNMLQAWVVWSMCNLENKIISVERILQYISIPAEPPLSIPEDRLALAQNWPSEGEIQLLDLHVKYAPQLPFVLKGLTVTFPGGLKTGIVGRTGSGKSTLIQALFRIVDPTIGQILIDGVDICTIGLHDLRSRLSIIPQEPTMFEGTVRSNLDPLGEYTDSQIWEALDCCQLGEEVRRKEHKLDSPVIENGENWSVGQRQLVCLGRVILKRSKILVLDEATASVDTATDNLIQKTLRQQFSEATVITIAHRITSVLDSDMVLLLDNGVAVERDAPARLLEDKSSLFSKLVAEYTMRSTHT

SEQ ID NO: 368832 - protein, 95 aa, Zea mays
  Clone ID: MRT4577_99549C.1.pep
MRNRIPEVTEAAVIEDFYRGSNDSAFVRAILQKAPTTSEQLFREADLYIIADERAQDLIGVPYHKDMRHTLQNCRDFKHSVGHDRLFQPLPPPPP

SEQ ID NO: 368833 - protein, 143 aa, Zea mays
  unsure (1)..(143): unsure at all Xaa locations
  Clone ID: MRT4577_9954C.1.pep
VWVARYILDRITEIACVVGTGDPNPIPGDXNGTHAHSNYSTESMKKEVVYXVINAAIEKLKLRHMXHIAAYCEGNXRRLTVIHETSYINTFSWGVTNRCASMLVFRXTDHIDKVYFXDRRPASNMDPYVVTYMISETTIIWKP

SEQ ID NO: 368834 - protein, 467 aa, Zea mays
  Clone ID: MRT4577_99550C.1.pep
METYTTDDALTAMGFGKFQALVLVYAGTGWLADSMELMLLSFVGPLVRQQWNVSAQHESLLSSVVFTGMLLGACSWGYISDKYGRRTALLFSVTLTAGAGLTSALSPNYISLLALRFLVGVGVGGTHVFSSWFLEFVPTKNRGAWMLVFSAFWTIGTIFEASLAWVVLSRLSWRWLLAFTSLPCFALLVFFVVAPESPRYLCAQNRISDATLVLERMSRTNKAALPPGALAYHHTETQLGLGESTTDDASKSGSGGMAALRRLFSRKLLRSTLLIWFVWFANSFAYYGLVLLTSQLSDANRRCASSSAHKSQAHEGNPNLYKDVFITSLAEFPGLVISAIIVDWLGRKATMWILLFGCCGFLGPLAVHQKESVTTALLFGARACGMGSSTVLCLYAPEVYPTSARSTGVGIATAIGKIGGIVCPLIAVGMLRSCHQMQAVLVFELVLGLAGVACILFPVETKGREMK

SEQ ID NO: 368835 - protein, 113 aa, Zea mays
  unsure (1)..(113): unsure at all Xaa locations
  Clone ID: MRT4577_99551C.1.pep
TPLHNHRVKNIYWWDKHNINLSKIYVLTQFNSASLNRHLSISYINNIAFYKNDPFIELLPPQHIPYNPNCFQRTPNTIHQYIWLFHXHNIIQFLILALYHLNPMYYQKFIQPH

SEQ ID NO: 368836 - protein, 167 aa, Zea mays
  unsure (1)..(167): unsure at all Xaa locations
  Clone ID: MRT4577_99552C.1.pep
MASPEFPGLVISAIIVDWLGRKATMWILLFGCCGFLGPLAVHQKESVTTALLFGARACGMGSSTVLCLYAPEVXCELFLVWLSTLYIILATLLPLXWQVYPTSARSTGVGIATAIGKIGGIVCPLIAVGMLRSCHQMQAVLVFELVLGLAGVACILFPVETKGREMK

SEQ ID NO: 368837 - protein, 212 aa, Zea mays
  unsure (1)..(212): unsure at all Xaa locations
  Clone ID: MRT4577_99553C.1.pep
METYTTDDALTAMGFGKFQALVLVYAGTGWLADSMELMLLSFVGPLVRQQWNVSAQHESLLSSVVFTGMLLGACSWGYISDKYGRRXLTSLXSLFVCYVLTLPYVKSTNLVPCDDCRTALLFSVTLTAGAGLTSALSPNYISLLALRFLVGVGVGGTHVFSSWFLEFVPTKNRGAWMLVFSAFWTIGTIFEASLAWVGLSRLSWRGLLAFTS

SEQ ID NO: 368838 - protein, 63 aa, Zea mays
  Clone ID: MRT4577_99554C.1.pep
PLFFFFFFFSFFFCPNGSISMKRVNIESSSSKLTETVVFTWQNLTTKCLLQFYRSPDKTVHKC

SEQ ID NO: 368839 - protein, 73 aa, Zea mays
  Clone ID: MRT4577_99555C.1.pep
KFPRSSASAMQGFPPPQRHLQVMLLPGVVPGDCFKPKFWPPHPGINKLFSPMGPLFPEKEAFFFWTLFQILTP

SEQ ID NO: 368840 - protein, 175 aa, Zea mays
  Clone ID: MRT4577_99556C.1.pep
MPVARPEPQEPRVIAHVDMDCFYVQVEQRRNPALRGQPTAVVQYNGWKGGGLIAVSYEARGFGVKRSMRGDEAKRVCPGINLVQVPVARGKADLNLYRSAGAEVVAILASKGKCERASIDEVYLDLTDAANEMVLQAPPDSPEGIFMEAAKSNILGLPADAMLYQLDLLLLCYLM

SEQ ID NO: 368841 - protein, 113 aa, Zea mays
  unsure (1)..(113): unsure at all Xaa locations
  Clone ID: MRT4577_99557C.1.pep
MAFWGGGLHTSPGGVPTGSGAVNLLLSRLSLPPRLVVPSAXLLXPAGGGTRGVFSRGQLGTSPVXAWLTRRSHDRTLAQGLKGDPTFLVVGPDMTLAPFGINAVCSHLXCVVP

SEQ ID NO: 368842 - protein, 105 aa, Zea mays
  unsure (1)..(105): unsure at all Xaa locations
  Clone ID: MRT4577_99558C.1.pep
RKVFADDYYLTVETNRTSLLCLYQQTSMLTFDVDKNLGSLAIDGWLESLPFHDCQHXIAPVDWHASGSQXVMIVFDYDSIQIAPELHPMTVSQAFYLLTDVVPLF

SEQ ID NO: 368843 - protein, 75 aa, Zea mays
  Clone ID: MRT4577_99559C.1.pep
VQALKLVCDQSGECNGSTGFSQNLRIQDVEAISRASGDVDFFDPTLFAELFTSSTRYDAMDASGFFRKNSSSGTL

SEQ ID NO: 368844 - protein, 148 aa, Zea mays
  unsure (1)..(148): unsure at all Xaa locations
  Clone ID: MRT4577_9955C.1.pep
CISSFFXTPGSXXEIXMLFSKXXVAKLRXTAHPXXIFFLTHTGSRYPSPAQERXLAFXXASPXLLEAHPAHAKRRSTXVNASQGRPXPRRKGAQPCGGXVESMGXRCTDAAXVEGHRREWYVIXVXRGHSVPTSXXRVGRNAWXXTRG

SEQ ID NO: 368845 - protein, 70 aa, Zea mays
  Clone ID: MRT4577_99560C.1.pep
ATDRLTWPLTWALTEALSYCLRYCLRNRAYSLLKELISELHLRIDYHYEANSVHALHDLIDQLVVHIAFY

SEQ ID NO: 368846 - protein, 75 aa, Zea mays
  Clone ID: MRT4577_99561C.1.pep
SGGALFFWGAFLGAGSLKRTRSDLGRAGRHWMEKGQMPYTATRVMTHEAARRGRATYTIAVVGQALTMATRGDTR

SEQ ID NO: 368847 - protein, 174 aa, Zea mays
  unsure (1)..(174): unsure at all Xaa locations
  Clone ID: MRT4577_99562C.1.pep
MGRXPSAGAPAFRFLPSEVEDMEARLLLVTTASPHRAVLDTLSYKXYTLSPXRAGKADIQTNQVWNWFTIYCTNTCPKLPXRLNGPAAKRRPMQLITXQHAANACGLRGVQLSSGAXAPMVLLSGKNPVESVSVKFDATTASDGAWDDVAAFLXHTMLESADPEVLVRSSGFTA

SEQ ID NO: 368848 - protein, 297 aa, Zea mays
  unsure (1)..(297): unsure at all Xaa locations
  Clone ID: MRT4577_99563C.1.pep
MSLYACCDFSWYLKSEDLVKKKKLRSEEPDPCLHWRSSIMPSTTAQQKPHVVLVPFPAHGHIAPHVQLARALRARGVHATLVHTELYHRRLLRTKQQQAXRAATTPWTRXGFSVEVIPDGLSLEDPPRTLRAYHEAMERNCLEPFKALLRDLLLPPTGVPPVSCVVADTPMPFAAVAAREVGVPDVQFFTASACGLMGYLQFQELLAREVIPLRPTYETDGSLDAPLDWVPGMKAVRLRDLPTFCHTTDADDWLVHFHVHQMKTAAASKAVVLNTLYDMEKDVVDALGAXLPAIYTV

SEQ ID NO: 368849 - protein, 188 aa, Zea mays
  Clone ID: MRT4577_99564C.1.pep
MGSGSFLKVLVSNLDVLAGPIVSLAYPLYASVRAIETKSPIDDQQWLTYWVLYSFITLFELTFAAVIEWLPFWSYGKLFFNCWLVLPYFNGAAHVYEHFVRPMIVNQQVVNIWYLPKKEGSDKPDDVISAAQKYIEQNGSKAFETLVNKFKTTNARRSILEEVEAERRARAERELAARDVNPFFHPNY

SEQ ID NO: 368850 - protein, 70 aa, Zea mays
  Clone ID: MRT4577_99565C.1.pep
SLHFVWLDLDILLVARPSGEVLRSCPPSLYCRAAFQGIKQSSPHFGVRAQKKKKDELMALFHKIQPAGQH

SEQ ID NO: 368851 - protein, 150 aa, Zea mays
  Clone ID: MRT4577_99566C.1.pep
WAVFFFVASAGFGVRCSFLRFRLFPWPPVFPPLSQVIPLAAGEGPPSPSPSSRGWGGSFFALGLSLFFVRFGGSAGPPGFWFVPRSVGPALLLFVCSLFCVRGFFRFMLFSPEVVCYCDWFPLFPRGGVSPCFRPAWGGARLHGRPRGVL

SEQ ID NO: 368852 - protein, 37 aa, Zea mays
  Clone ID: MRT4577_99567C.1.pep
AGFLMSPCNFVNTRLRGGLRVNLTDTLKINSYLFMFC

SEQ ID NO: 368853 - protein, 73 aa, Zea mays
  unsure (1)..(73): unsure at all Xaa locations
  Clone ID: MRT4577_99568C.1.pep
RACGAIXSWWALXGGGVDPYSMEPXXPLEFDSPIXXGRSLXAAGPTASQRNLELEARCXGQMKMEESIAHKTN

SEQ ID NO: 368854 - protein, 217 aa, Zea mays
  Clone ID: MRT4577_99569C.1.pep
MGASEVWSSVPAWLAIAVGLAAVVSSSEAHVFYAGGRDGWVLDPTESYNHWAGRSRFQVNDTIVFTHEEGVDSVLLVTEQDFDTCNTRNPVRRLQAVGSSGSSERSVFKLDRSGPFFFISSDEERCQKGQKLYVIVMAVRRSTTPAAPAPAPDAAFPPAPSPVPDSAFPPAPSPVWASAPDNAHAPPPTAGASRLDDGAIIGSVLGVIGALVLCTVY

SEQ ID NO: 368855 - protein, 115 aa, Zea mays
  unsure (1)..(115): unsure at all Xaa locations
  Clone ID: MRT4577_9956C.1.pep
CVEGVPNAPATGSPKDPPDRGKDPHPLFGEPPSYLTGEXPSDDGWDTAGLPADPETLAKNRELEENHSRWAKLGALGCNFPEPLSRNGVKIGEAGGLKAGSQIVSEGGLDYASNP

SEQ ID NO: 368856 - protein, 79 aa, Zea mays
  Clone ID: MRT4577_99570C.1.pep
SLRFPLCKGWTERNRCDPIWDGSCTTTGLACYSMAHECGGNMRAHTHNVHQKAVNHTEGANGPTENPGNRHPYVLPLMR

SEQ ID NO: 368857 - protein, 81 aa, Zea mays
  Clone ID: MRT4577_99571C.1.pep
NLIKGNIWKGNCPGGTKGKLNTPYDHVLGTHATTYEDRYQGFEIKVSPQNKWWKNSPTKIINSFDMKGKNWTKSPLGWTGR

SEQ ID NO: 368858 - protein, 69 aa, Zea mays
  Clone ID: MRT4577_99572C.1.pep
VPRPVHLYDFGWYVFWHWERIRVLHRKNLLSFFLIAVSPPPYVGLVFWWEPVRSWGVFLFDKKSIFQSK

SEQ ID NO: 368859 - protein, 95 aa, Zea mays
  Clone ID: MRT4577_99573C.1.pep
LRYCYWLRITFAVAEACLIAGATKNAYHTKYRDMVYAGNWTCQTLRKGVFIAGAVFVVFTMILDVYFYMYYSKATSQATKRISKTTPSVGMTGYA

SEQ ID NO: 368860 - protein, 87 aa, Zea mays
  Clone ID: MRT4577_99574C.1.pep
DAYVTVGYTKTTRFFSLPLLPPLGRSHLNQNPDQNTTITTTFTTHTAGEREPRGEPYCQTGRDALLQPPTAHTHWMHTIVTIRASPA

SEQ ID NO: 368861 - protein, 190 aa, Zea mays
  Clone ID: MRT4577_99575C.1.pep
MGDTGSSSILVHILVVALCLTAFGFAVAAERRRSTGSIVTDSSNATFCVYDSDIATGYGVGAFLFLLSGHSLLMGVTRCMCFGAPLAPGGSRAWSIIYFASSWITFAVAEACLIAGATKNAYHTKYRDMVYAGNWTCQTLRKGVFIAGAVFVVFTMILDVYFYMYYSKATSQATKRISKTTPSVGMTGYA

SEQ ID NO: 368862 - protein, 53 aa, Zea mays
  Clone ID: MRT4577_99576C.1.pep
IMLSSVQSVWINHQCPCIRGPHRMSVMIASGCVLESVYLTSEFALLVLNMVRV

SEQ ID NO: 368863 - protein, 346 aa, Zea mays
  Clone ID: MRT4577_99577C.1.pep
MGGHPRCLRLDAVGGARLRGGWRPSAIARLQGFSSCSPAAFPHQWSSRMMTTSSVVGRSKPGYGLCPALSFKDLHHPCCGGGRAEPGFYLPHGPAGCLFLQHSGERALTGLAEGANFANAGPVGRKRRQLQRAWLAGSAGSVAASDAASCRLIRAWPSVHLRGDCCAARTRGSSKTSTTPPRGGLCMPVREDLSGDLPMRAGAAAIRWHSAGTQVATVVGAEVVVARGGFSADETVGATRGQTSDSLALMVCPRPSSGDVGEGLLTAAFSQRSSLLLFSCPRRRSLSLLMERSPASHPKFVVPQALWCRGCSYPREWNRSSVCNGTLSMGVCSLWLTRPEHLGIWA

SEQ ID NO: 368864 - protein, 93 aa, Zea mays
  unsure (1)..(93): unsure at all Xaa locations
  Clone ID: MRT4577_99578C.1.pep
FPQRGRGHALQLRFFPRVGXCSXRWALVFFPSVGAKVKTSPFAQCLCQFRCINQNKTIDRFTLGPKTIGRLTLRPMHRWTKAYDKVIPSRSLT

SEQ ID NO: 368865 - protein, 143 aa, Zea mays
  Clone ID: MRT4577_99579C.1.pep
HAGTTAMAPPRRRASRPRCRTQGTATQASEQVALPYAGARARAQPLLLQAKPDIAAPASGRAAVAAPPLRHEGVAPLLLQRCADEQTRPHRDRAQAIAVAYEAHAIAAQASSHAPPPSRGKRASQATAPRARTHRLSHLRRCK

SEQ ID NO: 368866 - protein, 82 aa, Zea mays
  unsure (1)..(82): unsure at all Xaa locations
  Clone ID: MRT4577_99580C.1.pep
MSKIKIGINGLGRIGRLMARATLHSDNFTLVSGQDCLISTEYMSYMTKYDTVHGLWTHSATNAKXDCKTXLSFSEKDVACVS

SEQ ID NO: 368867 - protein, 72 aa, Zea mays
  Clone ID: MRT4577_99581C.1.pep
FFLFLHEYILEKLATKLFYFVCYIPKISRFIFKNYLKFFLVGFFSYYPTLSLTPQNLFTQMLVPQKIAGHFI

SEQ ID NO: 368868 - protein, 121 aa, Zea mays
  Clone ID: MRT4577_99582C.1.pep
FKIRCPFFYLLPFLYNSLTLLILYLGAPFSFPFFSPFTFTGLHLSSLPPISFPGLHFQLALLCIFQPSPFFIPFQKFPFTYCGIYITHPFPSLSFLNFRPFPSFFSPPLFFGPFFSVFLFF

SEQ ID NO: 368869 - protein, 38 aa, Zea mays
  Clone ID: MRT4577_99583C.1.pep
SVFCSSALRLGGVHATPMTYKKKVQLVLASTTLTPWRK

SEQ ID NO: 368870 - protein, 40 aa, Zea mays
  Clone ID: MRT4577_99584C.1.pep
QLGHPRAPGRCHSSRSPALIMVGASSRRDAQRSLAAPAPV

SEQ ID NO: 368871 - protein, 244 aa, Zea mays
  unsure (1)..(244): unsure at all Xaa locations
  Clone ID: MRT4577_99585C.1.pep
MPPSPLFALEAGRRSGARMEESPSRQATNPNSKTFSPSHRRRSSPSPPMDLSAVQAALSDKSYSTLASLCDELLLQAASQGFTTDEWPYSVHLLAHLYINDLNSARFFWKSLPXEVKDTRPELAAVWRIGQCLWKRDYAGVNTAAQGFEWGPDLADFITAFLESYRQRIFKLLTSAYSTIRVADVAHFMGMSEEDATNYAAQNGWSLDAAAKMLTVKKPKSQTNQKLDASKLQRLTECVFHLEN

SEQ ID NO: 368872 - protein, 121 aa, Zea mays
  unsure (1)..(121): unsure at all Xaa locations
  Clone ID: MRT4577_99586C.1.pep
KNKFFPFNQRGAMKFGGFFPQQFPFSPVVFASPQQFFSFYPIKALEFGGFFKQQKIFPFNQVIYFSPFAFFXQKKVVPFFLPGMPKGGALXKWNKLCPLNNLVFKNXTVFFQXPSLGGALF

SEQ ID NO: 368873 - protein, 81 aa, Zea mays
  Clone ID: MRT4577_99587C.1.pep
PLMPLGQPFFIPRTTTTMLHKFTFRYSNCQLNTTVAFPLTYAAGRGILKKPSFLLAGAYHFKSFLLYTHASIRLNLGHSEW

SEQ ID NO: 368874 - protein, 108 aa, Zea mays
  Clone ID: MRT4577_99588C.1.pep
GPTPPGPQKSQNPPMVQILFPLRPLNAPKALTKKKPLLKPFPVVKTFMLGLPPKNFVFKQTCTHSKTRQWGVWFKAPKKIFCVQVNLEALKNPPMVCVFKGSQVTPRG

SEQ ID NO: 368875 - protein, 334 aa, Zea mays
  Clone ID: MRT4577_99589C.1.pep
PRARRLPCPPTPTGKGETLGRLASGVQGTLMTELWMEVLPPPYFAGQAAGGWFLPDRRAGPGAWTLEENKMFERALARVDWDAPDRWERVAAMLPGRTASDVAAHYDDLECDVGCIEAGFVPFPCYGSGGGGGASQSAGFTFDWDAGGLGFKRSCYVVGGGKRERGPDQERKKGVPWTEEEHKQFLMGLKKYGRGDWRNISRNFVTSRTPTQVASHAQKYFIRLNSGGKDKRRSSIHDITTVNLPDDDAGGTASASPPSVLTSASAPSSTGGGGPVVSEQFGVLVDSKPPAPHHHFVPHPYGNVKLEPVSSHHGGFLDDSVLMQMHCGQLQPLG

SEQ ID NO: 368876 - protein, 37 aa, Zea mays
  Clone ID: MRT4577_9958C.1.pep
CTANSHILVSMGNYVSKKDALLDLFKSEYIGVHDSWI

SEQ ID NO: 368877 - protein, 81 aa, Zea mays
  Clone ID: MRT4577_99590C.1.pep
DSSGALSHNGGSSIGSPDRETFATKDVLCELDIYANSRYEAMVLKEDTKNMSWLHSVDDKSDQSPVFDHRFEPLPEPFGPL

SEQ ID NO: 368878 - protein, 105 aa, Zea mays
  unsure (1)..(105): unsure at all Xaa locations
  Clone ID: MRT4577_99591C.1.pep
GGRVAGYTHTIICHVLMLEDSDKGHVPAAPIVPYYLXVTPHGNEKNTEDELQVGGVYAKDQILIVGRRYRMRSKLGTVDLRNAQSLRSTYSYLILDLLLIVFLYI

SEQ ID NO: 368879 - protein, 58 aa, Zea mays
  Clone ID: MRT4577_99592C.1.pep
NKKLRTLKKKKNSQKKTCRAKTYVQSGNKEIMRGHVKLFPCHNYKLPSNHKQKPETLG

SEQ ID NO: 368880 - protein, 133 aa, Zea mays
  Clone ID: MRT4577_99593C.1.pep
KFIPSAPKGVYGGTCVKLAPHERGGKLPGTYAPLKRGKLVIRERGEGAPLKGKKKPRGGTTQGGKSKKKGGGNKGPKFGPKLGVIRAKGLTCGKLDSVTNYPKHPNGRDKIKNLGGQKRELTKKKNKGPTRRF

SEQ ID NO: 368881 - protein, 46 aa, Zea mays
  Clone ID: MRT4577_99594C.1.pep
TPGARGRAPPPLGEKNGALDTIGVTKKRKSLYHCLYDFTAPPWLSK

SEQ ID NO: 368882 - protein, 174 aa, Zea mays
  unsure (1)..(174): unsure at all Xaa locations
  Clone ID: MRT4577_99595C.1.pep
MGMSTQASAATRHLLAAAWAPAAQPRQXAXLALPSSSSRGGGPLRASTKEAVDAPKGFAAPXMDPSTPSPIFGGSTGGLLRKAQVEEFYFITWTSPXKEQVLXMPTGGASIMREGPNLLKLARKEHCLALRTRLRSKYKITYQIYRVLPNGEVHYLHPKDGIYPEKVNPGREGV

SEQ ID NO: 368883 - protein, 255 aa, Zea mays
  Clone ID: MRT4577_99596C.1.pep
VLGGCHLYLLGGRDPRRGSAMRRVVFYSARSNRWHRAPDMLRRRQFFDVCVMGNRLYVAGGEGGGGGLRSAEVFDPAKNRWSFVAEMAAPMAPFVSAVHGGRWFVKGIGAQQQVLSQAYSPVSDSWSIVLDGMVTGWRSPSACLNGRLYAAECMDGCRLRAYDEAVDAWSTCADSKQHRGSSQAAAIVALHGRLFVVRNDMSVSAVQVAAEAGKQRWQTLAGKAHTKSFVTGLLSNLSGRSRAKNNILHCQVLEV

SEQ ID NO: 368884 - protein, 75 aa, Zea mays
  Clone ID: MRT4577_99597C.1.pep
AQLHAFVFLIMWNTNRITSTDPLNGPITLLQIRWIHGGTWVTYSLSNFVGRQKYRKGKPNFMDRHIYMHSTYIDA

SEQ ID NO: 368885 - protein, 100 aa, Zea mays
  unsure (1)..(100): unsure at all Xaa locations
  Clone ID: MRT4577_99598C.1.pep
TPRQIHAAINSPSSAPSSKAPMVRTKQTARKSTGGKASRKQLATKAARKSASASGGAKNPHRFRRVHVVLLEIXQVXKTMELLMRNLDFQLLARDIAQDF

SEQ ID NO: 368886 - protein, 110 aa, Zea mays
  Clone ID: MRT4577_99599C.1.pep
SSHLKSGDKRQYLHQWLFCAGSCRMLITDQSHVLLIVVRRLFGRRGHTLMAARGGGIVGFRSAARAVRRVFFLGFCFFFKTKTKSAFFLLAVGVMCFVLHKANRTSKKKA

SEQ ID NO: 368887 - protein, 312 aa, Zea mays
  Clone ID: MRT4577_9959C.1.pep
ELQETVQYPVEHPDKFEKFGMSPSKGVLFYGPPGCGKTLLAKAIANECQANFISVKGPELLTMWFGESEANVREIFDKARQSAPCVLFFDELDSIATQRGSSVGDAGGAADRVLNQLLTEMDGMNAKKTVFIIGATNRPDIIDPALLRPGRLDQLIYIPLPDEQSRLQIFKACLRKSPVAKDVDLHALAKYTQGFSGADITEICQRACKYAIRENIEKDIERERRRKDNPEAMEEDEVDDIAEIMAAHFEESMKYARRSVSDADIRKYQAFAQTLQQSRGFGSEFRFSDQPTAAAGAADPFASAADDDDLYS

SEQ ID NO: 368888 - protein, 98 aa, Zea mays
  Clone ID: MRT4577_995C.1.pep
SPPSPWEPPSPGPKKGKGAPSGPTRFVPPLNVPPVGGPRLIVSLLKNFPPAHGSFLVPNPLSPLLGGLEFLPPKFKCPPPVPPFCACLALNPSGLSPS

SEQ ID NO: 368889 - protein, 54 aa, Zea mays
  Clone ID: MRT4577_99600C.1.pep
PPRVPGGVGPVPFLFPVCFPTGFVCSGMLENLNWGGHGLLAPPHPCGGVVFNKN

SEQ ID NO: 368890 - protein, 34 aa, Zea mays
  Clone ID: MRT4577_99601C.1.pep
LVGLPVFALCEKALIWREGTLFHTPYHCTTHPII

SEQ ID NO: 368891 - protein, 57 aa, Zea mays
  unsure (1)..(57): unsure at all Xaa locations
  Clone ID: MRT4577_99602C.1.pep
KQGAWGXVTGFDAIMFQGRRARSSGWIGYYVIMLQWKSCWMDSKSFWLLRRVNHGCG

SEQ ID NO: 368892 - protein, 93 aa, Zea mays
  Clone ID: MRT4577_99603C.1.pep
MPRIPLIKFPKRNLKAPSAPVPSQPADQHATLMSRLGAKAEAPSSGGIKNYRFSSDVPSPPSHTAVGGQASLLPKRKPLTEEEIEAIMLGGSI

SEQ ID NO: 368893 - protein, 232 aa, Zea mays
  unsure (1)..(232): unsure at all Xaa locations
  Clone ID: MRT4577_99604C.1.pep
GXAERGELAXESVRLRAELKKGATGLPFPEVISANIGNSQQLDQKPITFFRQVLSLLENPQLLEHEDVLLEKLGYKSDVIARAKWLLSEVSSVGAYSASSGVSGIKESIARFLERRDGIPADPKHIYLSAGASSGVNTLLHIICANKNSGVLVPIPQYPLYTASLSVLDAVCVPYLLDESKAWGTDLDIMRASYEKAKADGVDTRALVVINPGNPTGAXLSEADVRATIQFA

SEQ ID NO: 368894 - protein, 137 aa, Zea mays
  Clone ID: MRT4577_99605C.1.pep
MPRIPLIKFPKRNLKAPSAPVPSQPADQHATLMSRLGAKAEAPSSGGIKNYRFSSDVPSPPSHTAVGGQASLLPKRKPLTEEEIEAIMIQSVLRSGQTMGVFGMALLHPRAALLQNSGWSSSAPEFRLFLITGGSGG

SEQ ID NO: 368895 - protein, 113 aa, Zea mays
  Clone ID: MRT4577_99606C.1.pep
GNRAMGGGGEGMPLSLKKQGFFEFQGQRPGFPRLGDHLETQIKRATKKAKIAKTGKKKAPTGDATKPGPSQRSLLKNFQQKNMGGKAQIKGHKKPKKKGDHSFPKPQEGSPPL

SEQ ID NO: 368896 - protein, 54 aa, Zea mays
  Clone ID: MRT4577_99608C.1.pep
ASILWMEHYFSIHTISKERKKKEKITSAPQDCRNQLIALKTLTYAYSPCTQFAS

SEQ ID NO: 368897 - protein, 119 aa, Zea mays
  unsure (1)..(119): unsure at all Xaa locations
  Clone ID: MRT4577_99609C.1.pep
TPPNPXPPQXPHPFIRPSHVPWPPPPALTPXPPPHSPPSPPPSTSPLKSLHSPSXPPPXPPRSPPPAAPPASIPPPPPSSPRCPPQRPASPAPSLRARPPQXAPPHARLVPRRPPPXRP

SEQ ID NO: 368898 - protein, 838 aa, Zea mays
  unsure (1)..(838): unsure at all Xaa locations
  Clone ID: MRT4577_9960C.1.pep
MASQGEPSSSDPKGKKDYSTAILERKKSPNRLVVDEATNDDNSVVALHPDTMERLQLFRGDTVLLKGKKRKDTICIVLADETCEEPKVRMNKVVRKNLRVRLSDVVSVHQCPDVKYGKRVHILPIDDTIEGITGNLFDAFLKPYFLEAYRPLRKGDLFLVRGGMRSVEFKVIETDPAEYCIVAPDTEIFCEGEPIKREDEERLDEVGYDDVGGVRKQMAQIRELVELPLRHPQLFKSIGVKPPKGILLYGPPGSGKTLIARAVANETGAFFFLINGPEIMSKLAGESESNLRKAFEEAEKNAPSIIFIDEIDSIAPKREKTHGEVERRIVSQLLTLMDGLKSRAHVIVMGATNRPNSIDPALRRFGRFDREIDIGVPDEVGRLEVLRIHTKNMKLAEDVDLELIAKDTHGYVGADLAALCTEAALQCIREKMDIIDLEDETIDAEILNSMAVSNDHFKTALGTSNPSALRETVXSLVVASSVCCDKFLLIPKATLNFFFSXVEVPNVSWEDIGGLENVKRELQETVQYPVEHPEKFEKFGMSPSKGVLFYGPPGCGKTLLAKAIANECQANFISVKGPELLTMWFGESEANVREIFDKARQSAPCVLFFDELDSIATQRGSSVGDAGGAADRVLNQLLTEMDGMNAKKTVFIIGATNRPDIIDPALLRPGRLDQLIYIPLPDEQSRLQIFKACLRKSPVAKDVDLNALAKYTQGFSGADITEICQRACKYAIRENIEKDIERERRRKDNPEAMEEDEVDDIAEIKAAHFEESMKYARRSVSDADIRKYQAFAQTLQQSRGFGSEFRFPDQPTAAAGSAGAADPFASAAAAADDDDLYS

SEQ ID NO: 368899 - protein, 185 aa, Zea mays
  unsure (1)..(185): unsure at all Xaa locations
  Clone ID: MRT4577_99610C.1.pep
MEHTKSGPSSWPELADVVPVPQDDGPSPVVSIAYRDDFREVMDYFRALYLTGERSPRALRLTAEAIELNPGNYTVWHFRRLILESLDFDLLEEMKFVEKIAECNPKNYQIWHHKRWLAEKLGPGIANKEHEFTMKILAIDAKNYHAWSHRQWVLQAXGGWETELEYCDTYFRXDVFXNSAWNQRY

SEQ ID NO: 368900 - protein, 293 aa, Zea mays
  Clone ID: MRT4577_99611C.1.pep
MATASGTDAGAQPRDDPSLLPFASFSLGLSIRAPATPTLASVPSTLHLPTQISTLAVCARDEVRAEERVQKAVEKEGINVKYFWGSTLYHVEDLPFRLEDMPSNYGGFREAVKGLEVRKVLEAPEEVKCVPMKNVLEPGDIPTLAELGLTAPPAMSQDSKPAVGSTLIGGETEALERLKKFAAECSMQPNKVDKSNTQDSIYGANFSCKISPWLATGCLSPRFMYEELKKHATKAIPFGSTPKNNDGTSDAGTNWLMFELLWRDFFRFITKKYSSVQKTSEVATGCTPAPALA

SEQ ID NO: 368901 - protein, 233 aa, Zea mays
  Clone ID: MRT4577_99612C.1.pep
RRCPAARRPQPPPLRVLLARPLHPRAGHPHTRLRPLHPPPPHSNLYTRRLQKAVEKEGINVKYFWGSTLYHVEDLPFRLEDMPSNYGGFREAVKGLEVRKVLEAPEEVKCVPMKNVLEPGDIPTLAELGLTAPPAMSQDSKPAVGSTLIGGETEALERLKKFAAECSMQPNKVDKSNTQDSIYGANFSCKISPWLATGCLSPRFMYEELKKHATKAIPFGSTPKEYDGTSDAG

SEQ ID NO: 368902 - protein, 102 aa, Zea mays
  unsure (1)..(102): unsure at all Xaa locations
  Clone ID: MRT4577_99613C.1.pep
PAPEIAEDCRHAGAPALYDPDMXYVNNAYIDRKIYLRQGIGVGGFQKIYGGRQRNGSRPPHFCKSSGAVARNILQQLQIMVIIDVDPNGGRLITNQGRRDLD

SEQ ID NO: 368903 - protein, 447 aa, Zea mays
  unsure (1)..(447): unsure at all Xaa locations
  Clone ID: MRT4577_99614C.1.pep
MATASGTDAGAQPRDDPSLLPFASFSLGLXPSARRXTPTLASVPSTLHLPTQISTLAVCLHPSAAQPSSRRTTRLNSATSSVINPAALLNARPLPXFPSGAPAAAGRRRTLVWFRADLRLHDHEPFHAAAGASSSLLPVFVFDPRDFGKSPSGFDRTGPYRANFLLDSVADLRRSLRARGGDLVVRVGRPEVVIPELARAAGAEAVYAHGEVSRDEVRAEERVQKAVEKEGINVKYFWGSTLYHVEDLPFRLEDMPSNYGGFREAVKGLEVRKVLEAPEEVKCVPMKNVLEPGDIPTLAELGLTAPPAMSQDSKPAVGSTLIGGETEALERLKKFAAECSMQPNKVDKSNTQDSIYGANFSCKISPWLATGCLSPRFMYEELKKHATKAIPFGSTPKNNDGTSDAGTNWLMFELLWRDFFRFITKKYSSVQKTSEVATGCTPAPALA

SEQ ID NO: 368904 - protein, 345 aa, Zea mays
  Clone ID: MRT4577_99615C.1.pep
MRGQTETGRWRGGDGVAAWWVAVVALQLGHSLSRARAGLLESNPGLAYNFYQSSCPSAESIVRSVTWAQVAADPALPARLLRLHFHDCFVKGCDASILLDNAQSEKTAAPNLSVGGYEAIDAIKAQVEKACPGVVSCADIVALAARDAVSYQFGASLWQVETGRRDGGAPSLASDAAGLGALPSPFAGFGGLLAGFARRGLNLTDLVALSGAHTIGVASCSSVTPRLYQGNATSVDPLLDSAYARALMSSCPNPSPASATVGLDGGSPARFDSGFYARVRRGQGTLASDAALAQNAAAAQVMDDLATPASFYAAFSMSMKKMGRVDVLTGTNGQIRKQCRQVNTS

SEQ ID NO: 368905 - protein, 63 aa, Zea mays
  Clone ID: MRT4577_99616C.1.pep
FCSPRVTGRTPGAVMSTPVAGSPPPRLQKKDELHQPHAEAVHVALLVPLQGVGVLRSNVPVDR

SEQ ID NO: 368906 - protein, 153 aa, Zea mays
  Clone ID: MRT4577_99617C.1.pep
AGGFASRGLNLTDLVALSGAHTIGVASCSSVTPRLYQGNATSVDPLLDSAYARALMSSCPNPSPASATVGLDGGSPARFDSGFYARVRQGQGTLASDAALAQNAAAAQLMADLSTPASFYAAFSMSMKKMGRVDVLTGTNGQIRKQCRQINTS

SEQ ID NO: 368907 - protein, 62 aa, Zea mays
  unsure (1)..(62): unsure at all Xaa locations
  Clone ID: MRT4577_99618C.1.pep
FCLRAKLEGQLRPRGGCGYRLAPEALVRFLKDFEDXLGITITCSQETEPFGTAGPLALARDT

SEQ ID NO: 368908 - protein, 346 aa, Zea mays
  Clone ID: MRT4577_99619C.1.pep
MRGQTQTASAGGRWRGDGAAAWCWWWVAVVLLLGHLPSCARAGLLESNPGLAYNFYKNSCPSVDSIVRSVTWAQVAANPALPARLLRLHFHDCFVKGCDASILLDTAQSEKTAAPNLSVGGYEVIDAIKAQLERACPGVVSCADIVALAARDAVSYQFKASLWQVETGRRDGTVSLASNTGALPSPFAGFAGLLQSFSDRGLNLTDLVALSGAHTIGVASCSSVTPRLYQGNASSVDPLLDSAYARTLMSSCPNPSPASATVALDGGTPFRFDSSYYSRVQQKQGTLASDAALAQNAAAAQMVADLTNPIKFYAAFSMSMKKMGRVDVLTGANGQIRKQCRQVNTS

SEQ ID NO: 368909 - protein, 443 aa, Zea mays
  unsure (1)..(443): unsure at all Xaa locations
  Clone ID: MRT4577_99620C.1.pep
PARPRPDPPRGAAPSWSAAPVCAASAPPLATGAACTSAVVSLALRPRRKPAGGSESRGPVGLGAWARPLLGPMEGRDELAVPSLAGDVSCGDREFIAEVEMLSRLHHRNLVKLIGICVDRSKRCLVYELIRNGSVESHLHGADKAKGKLNWPVVRKIALGAARGLXYLHEDSNPHVIHRDFKASNILLEEDFTPKVTDFGLAREASNATQPISTRVMGTFGYVAPEYAMTGHLLVKSDVYSYGVVLLELLSGRKPVSISESKDPENLVTWARPLLSHKEGLEKLIDPSLEGNFNFDNVAKVASIASMCVHTDPSQRPFMGEVVQALKLIYNDPDEACDDSYSPRNSSDQDGDYEGDLVFESGSWGFGASGCLDYRNSLPFVTMDYSSGRIEGPHDPRAALSAGSHAQSPVLQNRSGPLRMKKKLASFYRSRGSISEHGHLPRH

SEQ ID NO: 368910 - protein, 90 aa, Zea mays
  Clone ID: MRT4577_99621C.1.pep
RDFNDGTTFANFHSEQYGWRICSLRGNMSHTTLVTKEGREMIKTSWSHMWGTTSPSSGIGRSINWQHSGGTRASRVGRYAGTRIFLLKSH

SEQ ID NO: 368911 - protein, 80 aa, Zea mays
  Clone ID: MRT4577_99622C.1.pep
MKLPARQRQNDRIHTVASPDRECPGRGKRKRISWCSKDPSCLKDPRKELRSIKGPAILECQEPWQGALPLEGYEVRKKKV

SEQ ID NO: 368912 - protein, 131 aa, Zea mays
  Clone ID: MRT4577_99623C.1.pep
LHRFFPKKGGGRTGGRLVFLFMGHACDGWQHEASPQKRSGVPMPGGFLKNFPNLSLRYRKSYTFKVFWPWRRVSLWGFFSFLRHFLSLPSIGFLGGSTNSALFKGFSGANPWPSFLGGRFKFLGMPILTGF

SEQ ID NO: 368913 - protein, 83 aa, Zea mays
  Clone ID: MRT4577_99624C.1.pep
DYRTPDQLDNQYYRNVISHKVLFASDAALLKSSDTLGLVYVAAFSQKLWQDKFGEAMVKMGGVQVKTAANGEIRRMCGYVNKP

SEQ ID NO: 368914 - protein, 44 aa, Zea mays
  Clone ID: MRT4577_99625C.1.pep
ENSCLTTLHLTWNHCVHKITTAVTVTQNLLVLYNLRSNKKYIIK

SEQ ID NO: 368915 - protein, 86 aa, Zea mays
  Clone ID: MRT4577_99626C.1.pep
LLFSIEQLHNHIHHTRTKKKGKLQPCFEELLNKFWMRSFPQGHTTKPPWKHALSLRLTEIMSTSNGLCGSMSVVYLLTSLILSNFT

SEQ ID NO: 368916 - protein, 40 aa, Zea mays
  unsure (1)..(40): unsure at all Xaa locations
  Clone ID: MRT4577_99627C.1.pep
KKKIGDEASIIYFAHSSIMSIVAPRXTGXTNLEESQNCKF

SEQ ID NO: 368917 - protein, 94 aa, Zea mays
  Clone ID: MRT4577_99628C.1.pep
AVTAHASSVALTSAPSKRMAHASASSALARAPPSVGATTAPPAAGAAAPPSVSPSAPSALSSTTRAVRLRRPHRHRRTRLHMIDSRQQKHVTEL

SEQ ID NO: 368918 - protein, 175 aa, Zea mays
  Clone ID: MRT4577_99629C.1.pep
MPSHQPVAGMSAVDPAYLSSQPSAASKPHPQEPVRNKAYDPKKPHITETPMTKKNWYKHVNWLNVILIVGIPMCGLVAAYWTPLYLKTAIWAVAFYFATGLGITAGYHRLWAHTSYSASLPLKIFLAAVGGGAVEGSIRWWARDHRAHHRYTDTDKDPYSVRKGLLYSHFGWMLM

SEQ ID NO: 368919 - protein, 89 aa, Zea mays
  unsure (1)..(89): unsure at all Xaa locations
  Clone ID: MRT4577_9962C.1.pep
DKILVTQILEGDCKAEILAXREGRSXPHHPXXQKKEGSGDLLLCASSGAXCVGEEKKEENASLAYEVEMCXCVCVFFFFFFXRKDRXGY

SEQ ID NO: 368920 - protein, 94 aa, Zea mays
  Clone ID: MRT4577_99630C.1.pep
ITPTKGQGHHGRAPTPAQQPTGTAWATQSRHRLPRALYPTTKREQEGTTDQHDSETRRANDAYWQGMSDYQSQGRATILHGWKHQGARRPWTDP

SEQ ID NO: 368921 - protein, 177 aa, Zea mays
  unsure (1)..(177): unsure at all Xaa locations
  Clone ID: MRT4577_99631C.1.pep
MVDYHAANQAYQYGPNSGGGNGAGGGGSMGDYMAQEDDWDRDLLLDPAWEKQQRKTFTAWCNSHLRKAGTQIENIDEDFRDGLKLMLLLEVISGERLPKPERXKMRVHKINNVNKALDFIASKGVKLVSIXAEEIVDGNAKMTLXMIWTIILRFAIQXISVEETSAKEGLLLWCQRK

SEQ ID NO: 368922 - protein, 54 aa, Zea mays
  Clone ID: MRT4577_99632C.1.pep
RAHQSSCLLFCLFVCFLCGPIAALGSRDKALSKITPTTMRLSRPALSSSCHRCP

SEQ ID NO: 368923 - protein, 31 aa, Zea mays
  Clone ID: MRT4577_99633C.1.pep
KFFEEEDPILRAETERIAALMVSRTRGRTRG

SEQ ID NO: 368924 - protein, 91 aa, Zea mays
  Clone ID: MRT4577_99634C.1.pep
HARNQARVGSYQGSRRRQDAAYRVLLRHAVGGGQDRRLPVRRSLRRCPACVQRPELIGEGRTTLGGDQQERRHRGDGGRRHARKLAVRDLG

SEQ ID NO: 368925 - protein, 80 aa, Zea mays
  Clone ID: MRT4577_99635C.1.pep
SGLYAYDTVWAIALAAEQAGFVNSDFVLSETNNGSTDFDKISAYKAAEKFRGAFLKVPFTGISGQFVIQDMQFQLVQQLT

SEQ ID NO: 368926 - protein, 83 aa, Zea mays
  Clone ID: MRT4577_99636C.1.pep
PCAESMRQQVAWRIKLYLRRLSTVPMRELCDSIMGFHLDGTSSLKLSLLYEMFSVIALVSSVDVACFSVSRQRAAHTRCCRRP

SEQ ID NO: 368927 - protein, 52 aa, Zea mays
  unsure (1)..(52): unsure at all Xaa locations
  Clone ID: MRT4577_99637C.1.pep
TATDQVLPAPTSAACXSXQTTAAPVANSLTFAGHARQAARASAPLLSNRFMA

SEQ ID NO: 368928 - protein, 63 aa, Zea mays
  Clone ID: MRT4577_99638C.1.pep
IPFPFFTDCFLCACGVSKIKNEPIVWSGSGSPPGMLGVGFFVLFLGHVILWHLYTPCISPPFG

SEQ ID NO: 368929 - protein, 63 aa, Zea mays
  Clone ID: MRT4577_99639C.1.pep
EHLGLHPSAGVAVDAAVVAEEVAIHIMRPSPAVQCRRGGGGAKRQGASSGTRRRGGRGVPGGA

SEQ ID NO: 368930 - protein, 75 aa, Zea mays
  unsure (1)..(75): unsure at all Xaa locations
  Clone ID: MRT4577_9963C.1.pep
MAGTDPXTAQDLTSVVQTLLQQMQGKFQTMSDQIIGRIDDMSSRIDDLEKNIADLMTQAGVEELESENKIPATQK

SEQ ID NO: 368931 - protein, 64 aa, Zea mays
  Clone ID: MRT4577_99640C.1.pep
SQTNILVTTNPSYAGCNSHSLTTGCDDHMPQLGFDDIEGADITNLNFVLRAEFFPTGPNNGTTL

SEQ ID NO: 368932 - protein, 79 aa, Zea mays
  Clone ID: MRT4577_99641C.1.pep
GKKPTVLLPTYSKTKVFFSLGKKKIIPRPDFNPFFFFCQPMFFKNRNFGSFVFKQKFPRGCKIYLEPAAIKFTSCPSLP

SEQ ID NO: 368933 - protein, 127 aa, Zea mays
  Clone ID: MRT4577_99642C.1.pep
KKKIIPTDEKNYSENKILKINNGHKTKQGLANNEANGQQTGITGGANPPHPETPKIGSQPILKYNNPHHPGFLGKKAIKPFPPARDTALNPSGKASLSLAYILFSSSALRNPASNKKLSCRISIFLG

SEQ ID NO: 368934 - protein, 230 aa, Zea mays
  Clone ID: MRT4577_99643C.1.pep
MSPPPRSRSFAVPQRGDEASQGKLAMISAERSQSQSPRSPGAAAGAPFLSICVTDPVKMGTGVQSYISYRVITKTNLPEFEGAEKIVIRRYSDFEWLHDRLAEKYKGIFIPPLPEKNAVEKFRFSKEFIELRRQALDLFINRLASHPELKQSEDLRTFLQADEEKMDRARSFETGIFKKPGDFIQMFKDVQSKVSDVVLGKEKPVEESTPEYEKLKHYIFELENHLAEAQ

SEQ ID NO: 368935 - protein, 68 aa, Zea mays
  Clone ID: MRT4577_99644C.1.pep
KHRAQSARESGGTTTCSAPGASLLRPRDRRTWDLPTARGVVLSRWRAVCLARRLCSKPSISSLWPGIR

SEQ ID NO: 368936 - protein, 49 aa, Zea mays
  Clone ID: MRT4577_99645C.1.pep
QCICTLSLRPVLDQVLSLMFVSFHYFKFINNIHIVNLSIKNRFNNLFDL

SEQ ID NO: 368937 - protein, 63 aa, Zea mays
  Clone ID: MRT4577_99646C.1.pep
NFYMISVKSLNSKVGLYCSSTLSQGWPLKFWKRKKKKKKKKKKKKKKKKKKKKKNVTTALFPP

SEQ ID NO: 368938 - protein, 103 aa, Zea mays
  Clone ID: MRT4577_99647C.1.pep
RRRTFASVSSRLTHEHCRRSLPPDPTPGEIGRCLQDGQTRARHDSTEARHASRYNGSELVDTASCTARDTQEATPTTEIQSCTTMERKAKAATNRGATHQRRR

SEQ ID NO: 368939 - protein, 191 aa, Zea mays
  unsure (1)..(191): unsure at all Xaa locations
  Clone ID: MRT4577_99648C.1.pep
RRPPSPSRTAASAPRPARRSGPATRPPRRAPTPPPAARTRTRTRPRTPGSVRPARRAAGRAGLRSCPPPPHVGTPRDTGYPGRQPSTRRRPRRGPAGRRGRRAPAPRPPARARRGGSRGTARRRRXRRPACLGHRRPGPRARRAARRGEESRARTRPPLPSRPDACVCVRERERQRERETRRKVWKRGEGG

SEQ ID NO: 368940 - protein, 99 aa, Zea mays
  Clone ID: MRT4577_99649C.1.pep
RSKLIGGRGPAASGRARREKPQEEALRETAGRKPGAPSYLDDERHVPKKEGSSGIQSWGSTGSSHTSSSTGLRTVRAAAGETLSAARPTKRSPDQAASQ

SEQ ID NO: 368941 - protein, 80 aa, Zea mays
  unsure (1)..(80): unsure at all Xaa locations
  Clone ID: MRT4577_9964C.1.pep
NNDYSDPLFWTNNMGSGPXXXFHVPLKEGPKVFVALGCSLFLFRVSLAGVCFSFXGFXRGCLCACSXXXXXLXXVYLCLP

SEQ ID NO: 368942 - protein, 366 aa, Zea mays
  Clone ID: MRT4577_99650C.1.pep
MLRAASQLPSPNHPRPCCLLSTSTTAVPFSLEDYLVAACGLAPAQAREVSKKAFRELCRKSSKEGISRSRLLSASNPDAIIALLAGTGLSRDDIVAAVSADPLLLRASVKNIAPRLLALRDRVGLSTPQIARFLLVGPGALRHSGVVPQLEFFISFYGSFEQVLVALKRNRRLLCTSLEKLIKPNIALLRQWGVRDIAQLCSNVPRVLNFNPERVKEFLLRAEQLGVPPTSRLFRHAVAVVACMSGAKVAAKLEFLKRSLCCSEPEVSTAVSKMPYILGLSDEVLLRKIEFLVNKAAMEPRHIVERPNLLTYSLEKRLVPRHCVLKVLREKGLLNSNMSFNTFTHFGERTFKSRRTVYGGTVTHGH

SEQ ID NO: 368943 - protein, 114 aa, Zea mays
  Clone ID: MRT4577_99651C.1.pep
PQLKLGLCMSSQRSLVVPLQMEKTCQLLMAMSYSSTKDRSPEPQNEMLELRSRGHNNSTRCSISICEARNRVLVTVNEPRFESPLSKMSKCVKAHIAIQQSLFPQDLQYTMPWH

SEQ ID NO: 368944 - protein, 305 aa, Zea mays
  unsure (1)..(305): unsure at all Xaa locations
  Clone ID: MRT4577_99652C.1.pep
MEGDTGNRYGKQVAVVTGGNRGIGLEICRQLASSGVTVVLTARDAERGAEAASTLGQPNVVFHQLDVGDPSSAARLAGFIEEKFGRLDILVNNAAITGTTSNVDDPEAVWKQLAGMDLMQRIEAINKHNTEPYEQAQKCLRTNYHGTKAVTKALLPLLQSSSHGRIVNLSSSYGLLRFFSGDELKEELSSIDGLSEQRLDELSELFLKDFKDGQLEXRGWPNEGGFVTYKASKALANAYSRILAKEHPSLCVNCVHPGYVQTDMNFRSGHLTVEEGARGALMLAMAPKGGVTGAFLDHTEVASFV

SEQ ID NO: 368945 - protein, 47 aa, Zea mays
  unsure (1)..(47): unsure at all Xaa locations
  Clone ID: MRT4577_99653C.1.pep
MNIGMMTMTKGWQRDDRELSRLFVKGGLTEXKIVNECGARVAFQVYR

SEQ ID NO: 368946 - protein, 75 aa, Zea mays
  Clone ID: MRT4577_99654C.1.pep
LHHQLLLHHPPGAPERVNITSRGIHRRMRMIFLRSHRRQRRRFSLGCRSLGRHGYGSGRGHQLHGLLNDVTRDRG

SEQ ID NO: 368947 - protein, 123 aa, Zea mays
  unsure (1)..(123): unsure at all Xaa locations
  Clone ID: MRT4577_99655C.1.pep
LKEELSSIDGLSKQRLDELSELFLKDFKDGQLEAQGWPNEGGFAAYKASKALANAYSRILAKEHPSLRINCVHPGYVQTDMNFGSGHLTVEEGARXGALMLAMEPKGGVTGAFFDHTVVASFV

SEQ ID NO: 368948 - protein, 65 aa, Zea mays
  unsure (1)..(65): unsure at all Xaa locations
  Clone ID: MRT4577_99656C.1.pep
WHPGTKKRWGNLLAGVTIXHGXGVMPNINPVLLPKKPPVGAAKEAKSKRSPKKSSTTKSPKKVAA

SEQ ID NO: 368949 - protein, 129 aa, Zea mays
  Clone ID: MRT4577_99657C.1.pep
QVLKRRRTERGAQQHERPARTEAGRPVKAVSQGLQGGAGGSRGRPNEGGFVTYKASKALANANSRILAKEHPSLCVNCVHPGYVQTDMNFRSGHLTVEEGARGALMLAMAPKGGVTGAFLDHTEVASFV

SEQ ID NO: 368950 - protein, 305 aa, Zea mays
  unsure (1)..(305): unsure at all Xaa locations
  Clone ID: MRT4577_99658C.1.pep
MEGDTGCRSEKEVAVVTGGNRGIGLEICRQLASSGVTVVLTARDAERGAEAASTLGLPNVVFHQLDVGDPSSAARLAGFIEEKFGKLDILVNNAAITGTTSNVVDPEAFRQELAXLGCHADXEAINKHNTEPYEQAQKCLRTNYHGIKAVTKALLPLLQSSSHGRIVNLSSSYGLLRFFSGDELKEELSSIDGLSKQRLDELSELFLKDFKDGQLEARGWPNEGGFIAYKASKALANAYSRILAKEHPSLCINCVHPGYVQTDMNFRSGHLTVEEGTRGALMLAMAPKGGVTGAFFDHTEAASFV

SEQ ID NO: 368951 - protein, 61 aa, Zea mays
  Clone ID: MRT4577_99659C.1.pep
SHPSTYNLPTPIILSHSTYSHFSNSSTHSHLQLLLPLIHLPFLIPTYLITTTSIITSLPLH

SEQ ID NO: 368952 - protein, 139 aa, Zea mays
  Clone ID: MRT4577_9965C.1.pep
PREAPHMDTVLSHAESGLVHPDELDEEFDTFPTSKPGDVVRMRYDRLRSVAGRVQTVVGDLATQGERAQALLSWRDPRATAIFIMLSLVVAVVLYVTPFQVVAVVLGLYLLRHPRFRSKQPSVPFNFYKRLPAKSDMLL

SEQ ID NO: 368953 - protein, 117 aa, Zea mays
  unsure (1)..(117): unsure at all Xaa locations
  Clone ID: MRT4577_99660C.1.pep
MGGYHPYHLXIRQPARGQIHGFRMFFWYEPLGILEKFFQGPKRVKCFQKVNEVPQKYWGLYLSDALEQDLPGPLFSYPMGVTADGRVSKLPGMENFPDTRARVFGNKLDFLPPILPQ

SEQ ID NO: 368954 - protein, 84 aa, Zea mays
  unsure (1)..(84): unsure at all Xaa locations
  Clone ID: MRT4577_99661C.1.pep
LILFFFFGGGGXFPHLTILLQXYINLKFLFXITLILIPILXTQXLLYFPITXKXSIKYIXHYXIXIINXSYLLNSFXKSQHITN

SEQ ID NO: 368955 - protein, 66 aa, Zea mays
  Clone ID: MRT4577_99662C.1.pep
FHVLHYLRSCSTCKISFPLNKIIALMFAYKGSSYHVSNTSNSINPTPKLASNPVGRYCMSNVKSYK

SEQ ID NO: 368956 - protein, 54 aa, Zea mays
  unsure (1)..(54): unsure at all Xaa locations
  Clone ID: MRT4577_99663C.1.pep
PTRPTTRSRGGVYXFMLPHGETKLRGPPSLYYPRIHILPCLTVHLEYTHQDKCH

SEQ ID NO: 368957 - protein, 39 aa, Zea mays
  Clone ID: MRT4577_99664C.1.pep
APKLPKQILCPVGATTNGPGFSKVGGTKGLWLSSGFAIN

SEQ ID NO: 368958 - protein, 104 aa, Zea mays
  unsure (1)..(104): unsure at all Xaa locations
  Clone ID: MRT4577_99665C.1.pep
WKGRVLRKQVGTREARKWEPMSVGGKRGGGDRAXIVALREIRKYQKSTELLIRKLPFQXRLVXEIAQDLKTDLRLQSXAVLGLKEXAAEGYLXVGLFEDTNLWS

SEQ ID NO: 368959 - protein, 47 aa, Zea mays
  unsure (1)..(47): unsure at all Xaa locations
  Clone ID: MRT4577_99666C.1.pep
AGRRRAEDGHAQGGXGPWMXMEDGLTXLADRXLAAANTHYTTRAAET

SEQ ID NO: 368960 - protein, 65 aa, Zea mays
  Clone ID: MRT4577_99667C.1.pep
MGPKIGGGTFNQNTTWAFTNSLMKLVSNATHALMPIQIINGRMALPITQLNNTFSQTIKKGTHLN

SEQ ID NO: 368961 - protein, 168 aa, Zea mays
  unsure (1)..(168): unsure at all Xaa locations
  Clone ID: MRT4577_99668C.1.pep
NKSLLMLLGLIANANEATTMPXWSQASICVLQSTYLXNGVVGMXENGAIQPYRMQQELAHLMLPXITLXLQQSXAYNEQLPLVLLXAQNIKAQQLQHRXYASXAAYYNWLNGISCNRLSESNSAVXVQQTYNYTFSQLXADYRQLAHAFNQLAPWNSAAYIQQQQLLP

SEQ ID NO: 368962 - protein, 75 aa, Zea mays
  Clone ID: MRT4577_99669C.1.pep
CSDSCFRLPTCGAPGRQGSFSIRFRSLRLDEALPQVLSGLPSAAAVGSLLPDVFHVPAPSSDQIHAGAFCYDRIW

SEQ ID NO: 368963 - protein, 52 aa, Zea mays
  Clone ID: MRT4577_9966C.1.pep
LSNDPIYTPQFTCTSLYCFPNLLTNIIILYITTLVHQDSSLLVHVLLFVLFK

SEQ ID NO: 368964 - protein, 102 aa, Zea mays
  Clone ID: MRT4577_99670C.1.pep
PPLGECCPSHEATGILWGCTGLGKEGPSVSTGLLGELRAVIIWSRSGINHSQRSSSVDCVGERILILGRHLGFDCTGPLNHLIWAKPVIHPVPGPNGLPPLL

SEQ ID NO: 368965 - protein, 48 aa, Zea mays
  Clone ID: MRT4577_99671C.1.pep
SGLWYMERLTICTTQTLFCSTCTNTVHALRSAQSHVHHSLAPHPRTRG

SEQ ID NO: 368966 - protein, 72 aa, Zea mays
  unsure (1)..(72): unsure at all Xaa locations
  Clone ID: MRT4577_99672C.1.pep
PGSSHAGADAWADAWATTHIPLLTVSGKKGKSTRKQEMECHSCXVSLGSEYLPRVGLNQAKTKWHTRPCGKS

SEQ ID NO: 368967 - protein, 163 aa, Zea mays
  Clone ID: MRT4577_99673C.1.pep
MAGLQELRFPEEKPLLRGQDAAELENSDTFLLAMDTDWKEHDIETPYGLLHVVIRGSPKGNRPAILTYHDVGLNHKLCFNTFFNFEDMQEITKHFVVCHVDAPGQQVGASQFPQGYQFPSMEQLAAMLPSVVQHFGFKYVIGIGVGAGAYVLAKFALIFPDLV

SEQ ID NO: 368968 - protein, 49 aa, Zea mays
  Clone ID: MRT4577_99674C.1.pep
CRCGGRRRSGRAFRLVAACADTTSNMTGMSVSARRQDTKSMPLRRDARS

SEQ ID NO: 368969 - protein, 85 aa, Zea mays
  Clone ID: MRT4577_99675C.1.pep
CDTINQMCWDTFYHASSTFISSTTTSDAPFCRKTGTLASACSPLLLTWRCHTTEICQAFYAAQVSVFYRRTQEDVDPLTIQRFSP

SEQ ID NO: 368970 - protein, 61 aa, Zea mays
  Clone ID: MRT4577_99676C.1.pep
KDYNPPKMEGSTPPLKWQQDAKNPQRIMNPFKEPYGPTLPFHWEFFKSEGRGFGPKSLQKL

SEQ ID NO: 368971 - protein, 57 aa, Zea mays
  unsure (1)..(57): unsure at all Xaa locations
  Clone ID: MRT4577_99677C.1.pep
SFFFFXFFFYGSLLMAAKALHMKQTRKQTSWGISGPITTPYTNHLLGQRQYRTHDKH

SEQ ID NO: 368972 - protein, 101 aa, Zea mays
  Clone ID: MRT4577_99678C.1.pep
SQDVVVVGAVDTGHRIFTGDVGGLLWRSQRANGGRTSRFTQKTRYWVLGAQDGSPSPTGPMTAVAVLQTTRVVVPRSSGLFWFSRLCIFQLISVSSELCNV

SEQ ID NO: 368973 - protein, 99 aa, Zea mays
  unsure (1)..(99): unsure at all Xaa locations
  Clone ID: MRT4577_99679C.1.pep
ITCRCRLTRVLACITVPSSLSCLRCTDHGHAQGPPRQHXTGLDEGQQTPTASTQKDAGRTTRPASMPTRSRTKLRCLLGSHKYMRGWLEPARSSLHLYR

SEQ ID NO: 368974 - protein, 194 aa, Zea mays
  Clone ID: MRT4577_9967C.1.pep
RTPPSSLSRRAPKIRSAATPPAAPNPSGQGLIRACPARNPRDSRRISSGVGRMMMGFMMGKRKELEQVVDGLCDFSLSGPAAKCRRLDPGLPPILEEEPPCPSIPYQHQTLGEEISSGANMPIVEDMIEVAMPSHLSSEDKTLVIYKPVNKPTLFGLSIANPSIIVSSDLIRGLKNQPFNQGNCHGLEDNSPER

SEQ ID NO: 368975 - protein, 62 aa, Zea mays
  Clone ID: MRT4577_99680C.1.pep
NYNRYNHVEEIHGEHLVLRGNPFIKDHGTTRTSGPLPKRLAPPANTETVPLGLPIFLIMSPI

SEQ ID NO: 368976 - protein, 55 aa, Zea mays
  unsure (1)..(55): unsure at all Xaa locations
  Clone ID: MRT4577_99681C.1.pep
MSTTTASTLNPNAPIFIPEAYREAEDFSSXWWELDNTTAWFRDHCFRQRQLHEVV

SEQ ID NO: 368977 - protein, 61 aa, Zea mays
  Clone ID: MRT4577_99682C.1.pep
AAWVRASSRKQSSVKTKLVAWCSPSARQKAQTSCATQVRFVKIIQSRRGSSAIDYRRKEGS

SEQ ID NO: 368978 - protein, 40 aa, Zea mays
  Clone ID: MRT4577_99683C.1.pep
MATSTTPPETMLLMKLLSDREIPGAGCGTSVSTSADGTVG

SEQ ID NO: 368979 - protein, 86 aa, Zea mays
  Clone ID: MRT4577_99684C.1.pep
FMHTDTSYHALAPSTLMIQANIILRGRYYFRHFSRLTNMSIRRNRTCSGFYCVAIKVIAVQRFIQRTIDSSVRIQYISRPSLYIVP

SEQ ID NO: 368980 - protein, 69 aa, Zea mays
  unsure (1)..(69): unsure at all Xaa locations
  Clone ID: MRT4577_99685C.1.pep
SCCCGSSCXCGQKYPXLEDTSTAARVTVVLGAXPDNRPRPSSSRPRGQSGEGAHRCTCRVNCQRHPCNC

SEQ ID NO: 368981 - protein, 139 aa, Zea mays
  Clone ID: MRT4577_99686C.1.pep
LRVGQKALYSDQISLGMRFRMMFETEELGMRRYMGTITGITDLDPVRWKNSQWRNLQVGWDESAAGERRNRVSMWEIEPIAAPFFICPQPFFGVKRPRQIDDESSEMENLFKRAMPWLGEEICIKDAQTHNTTMPGLSL

SEQ ID NO: 368982 - protein, 40 aa, Zea mays
  unsure (1)..(40): unsure at all Xaa locations
  Clone ID: MRT4577_99687C.1.pep
KPSLHCXLSAYLLAADRLQPCGNLRTAAGLPAGINRPQLP

SEQ ID NO: 368983 - protein, 68 aa, Zea mays
  Clone ID: MRT4577_99688C.1.pep
RSGSISVAKTLSQCRSSRGCPHDTVCLCYSSSLVDGYACRACSYSEFLPTVSSISSLSKRRRHRCDAA

SEQ ID NO: 368984 - protein, 349 aa, Zea mays
  Clone ID: MRT4577_99689C.1.pep
LLSHTTWRVSAGRRYHWQAPLSLSPLPRVKTPEVPSCSVRLLRRRPRKRRPATNLPARRRVQAAGSVGPHARRATRTDSTTEESGSKLPLADFIAAAAVQPCPPAIQRGSFPGWVSADPELELPSIDLLLPICTSTEWLRTMITCSFPLMVLHTHQLLKECPPMWNPQYWQPNPYDFPSGSNIQFSSSHLTIPSLSQQQNEVGGFANRGPWNHFVGMMNPSYPCPPPPLAAGQMQPPSHFVTLPNNSSNPMDPIFLESEAEHSAQEVNSPSKEGGTPGKGKKMKEQNFTPVQEDLLLCTTWLEISCDPVISTGQRKEGLWARIDKQYNEMRGEYPKRVIRALTSRWDKN

SEQ ID NO: 368985 - protein, 31 aa, Zea mays
  Clone ID: MRT4577_9968C.1.pep
KWNESHNKKISSPFRQLNKLTYRGKKFERGK

SEQ ID NO: 368986 - protein, 90 aa, Zea mays
  Clone ID: MRT4577_99690C.1.pep
NKPSWAKQTSRRGTIRGHSTPLTFFPPCPGFSPLTLGECAYLFLVQPNGVNPWQAFKFKPDGGGGTCSNCPMFIIPLAANGPGQLLAGRP

SEQ ID NO: 368987 - protein, 206 aa, Zea mays
  Clone ID: MRT4577_99691C.1.pep
MFNQTGLTLCDKTSMATTLFTTENKRGFPFMHCWTKLKNEPKWQAIVQGTSLRGAAGMSPVGSATPTASVNDLDSDSLGLTGKRPLGRDSTKASRKKAMSTSSQSMKYLTRIHDLQMARLKQSEDKVEKKEAHYEVFKDLEYKKLQVQQEQIEVEKTKLKFQERKEKNDELKEAMAVDLEDIAEDLRPAFIAKRKALVDWFVNNPN

SEQ ID NO: 368988 - protein, 51 aa, Zea mays
  Clone ID: MRT4577_99692C.1.pep
RVASKNDIRGATFYLINKYAGLQPSVDAIESALYRIIIESFFYRKKPKNES

SEQ ID NO: 368989 - protein, 110 aa, Zea mays
  Clone ID: MRT4577_99693C.1.pep
RTFSISFISLARSFLVGNFLAAVLLSLAVQLPCELLCWPLLLGFQLAMSISLLPLAHSALAFQQPAMPALSLLASVQNRAAPVLSSAAVLPPTADASPGPRRRAVRWDYP

SEQ ID NO: 368990 - protein, 645 aa, Zea mays
  unsure (1)..(645): unsure at all Xaa locations
  Clone ID: MRT4577_99694C.1.pep
RSGGQAQLAEIRAELVKAKEQLLDNEKEKCRVLAELERAKKVADEANAKLQDALDVQRRAIEAQEADKLPAGESEQATIHDQQEADDTVLRSTVEQLEKARYELANAIDARNEALSQVDDAVRASEAKQLIXSKVDGEEXTAERIQNLEEENFALKLELQKKKAAEEKAVRLEHMIDELQSDVDDARNFGSKSKQLADEWQKKAQLLEVRLEEADQSNILKGESLNSAMEELDSTSSLLRDRESEVAALRDKVRFLEDELTKLKNDIVVSGQRADAAEKEAADLWTEVEGLRLKLHTVEEEKMEALNSDKNTSSEIETLNEQKNQLADELEASKDELEKIKKAMEGLASALQEMSAESREAQEKYLLKQDEIERAQAQVEELNLSLKNTKENYELMLDEANYEKVCLTKAVERLEAEAKSAHDEWQSKELSFVNSIKNSEEEIVAVRVQMDRTLEVVKEKENENTELQEKLQQLESQLMEANRIREEGNAETIRWKENILDQENELQNIKQENDDLQAKELAASEKVKALSFQLANVKDSTINSNTKEGDNEKGGTEEDDEPVVVVAKMWENGKFADYDSSKEKDNDGDSQVDLESNKGDAGLDSNGLHSTKESSGRASTKQPQQHKKKPLLKRFGGLLKKKSEN

SEQ ID NO: 368991 - protein, 63 aa, Zea mays
  Clone ID: MRT4577_99695C.1.pep
EKNDATHRLFGIKQGGDSGLASNGLHSTKETSGRASPTKQHQQYKKKPLLKRFGGLLKKKSEN

SEQ ID NO: 368992 - protein, 77 aa, Zea mays
  Clone ID: MRT4577_99696C.1.pep
QRAATWRRLLTALAASSHRQSSSAALRRHLMKASSATPLSASPVVFAIRSVDRLPWILLRRRSRSSLTCSPASPTSP

SEQ ID NO: 368993 - protein, 112 aa, Zea mays
  Clone ID: MRT4577_99697C.1.pep
MVLTGRQWSGLKQLGARRWRLQGRGLHGWGHHADGTNTGGYRGGGSMDGGSHDSATKGTGGSCSGGSKAAASMAGATHDVANKTTTSHDIATKHGGSAPRHPQAGPSSPAPP

SEQ ID NO: 368994 - protein, 78 aa, Zea mays
  Clone ID: MRT4577_99698C.1.pep
MWENSKFADYDSAKEEDNDGDSQVDLESNKGDAGLASNGLHSTKETSGRASPTKQPQQYKKKPLLKRFGGLLKKKSEN

SEQ ID NO: 368995 - protein, 250 aa, Zea mays
  unsure (1)..(250): unsure at all Xaa locations
  Clone ID: MRT4577_99699C.1.pep
RRHTNDLKFSLTDENKIARVKYCLSMINGXTIFKPLYNVVYIDEKWFYRTRKNQKYYLTNDEERPQRCVKSNNFIEKVMFLAVVTRPRYEANENCTFDGKIGIFPFVKVEPAKRKSQNRERGXNVILSATFSYALHNIVFAFAGVLVTKPMTSVTKDVSRNFLVNTVLPALKAKWPAEERGMPIFIQQDNARTHIGVDDPSFVTAAKEDGWDIRLTCQPPNSPDLNVLDLGFFAAIQSLFEKGTPNNKNE

SEQ ID NO: 368996 - protein, 59 aa, Zea mays
  Clone ID: MRT4577_9969C.1.pep
VCWPRRAKFVCPLGFRREKTTLPVNRYMGVLKVKNRKVVLEKKIVWSLLICSLVKFCKS

SEQ ID NO: 368997 - protein, 503 aa, Zea mays
  unsure (1)..(503): unsure at all Xaa locations
  Clone ID: MRT4577_996C.1.pep
MVGKEQARAKVTQNIVFVTGEASPYAKSGGLGDVCGSLPVALAARGHRVMVVMPRYLNGTSDKNYANAFYTEKHIRIPCFGGEHEVTFFHEYRDSVDWVFVDHPSYHRPGNLYGDKFGAFGDNQFRYTLLCYAACEAPLVLELGGYIYGQNCMFVVNDWHASLVPVLLAAKYRPYGVYKDSRSILVIHNLAHQGVEPASTYPDLGLPPEWYGALEWVFPEWARRHALDKGEAVNFLKGAVVTADRIVTVSKGYSWEVTTAEGGQGLNELLSSRKSVLNGIVNGIDINDWNPATDKCIPCHYSVDDLSGKAKCKGALQKELGLPIRPDVPLIGFIGRLDYQKGIDLIQLIIPDLMREDVQFVMLGSGDPELEDWMRSTESIFKDKFRGWVGFSVPVSHRITAGCDILLMPSRFEPCGLNQLYAMQYGTVPVVHATGGLRDTVENFNPFGENGEQGTGWAFAPLTTENMXVDIANCNIYIQGTQVLLGRANEARHVKRLHVGPCR

SEQ ID NO: 368998 - protein, 52 aa, Zea mays
  Clone ID: MRT4577_99700C.1.pep
YPRGRPGKKKIKKKKKKRKKKKKKKKKKKKKKKKPLLGEFEASTVTSLGLLI

SEQ ID NO: 368999 - protein, 57 aa, Zea mays
  Clone ID: MRT4577_99701C.1.pep
VQMALVEFCYAWPHIEEVMLHNGDSCPRLLTNVIHGLDRTVARVIRIVPIERMSCRI

SEQ ID NO: 369000 - protein, 128 aa, Zea mays
  Clone ID: MRT4577_99702C.1.pep
GRDSLSPSAPVQPSQHPRAARSSRPWRAPTWRRPPRGSCWPRACPLPVAAAAVATKPKAEKPPPIGPKRGAKVKILRRESYWYNGIGNVVTVDQDPNTRYPVVVRFNKVNYAGVSTNNYALDEILEVK

SEQ ID NO: 369001 - protein, 88 aa, Zea mays
  Clone ID: MRT4577_99703C.1.pep
MASTNMASATSRFMLAAGVPTGTSGGRVNFAKVKILRRESYWYNGIGNVVTVDQDPNTRYPVVVRFNKVNYAGVSTNNYALDEVLEVK

SEQ ID NO: 369002 - protein, 105 aa, Zea mays
  Clone ID: MRT4577_99704C.1.pep
AGRSGVLTHSPPTRARPDRLTEAAEGEGAVATKPKAEKPPPIGPKRGAKVKILRRESYWYNGIGNVVTVDQDPNTRYPVVVRFNKVNYAGVSTNNYALDEVLEVK

SEQ ID NO: 369003 - protein, 139 aa, Zea mays
  Clone ID: MRT4577_99705C.1.pep
MASTNMAWATSRFMLAAGVPTASSGSGRVSFASAPNRLGRRLVVRADEESPAEPAPTAEGEGAVATKPKAEKPPPIGPKRGAKVKILRRESYWYNGIGNVVTVDQDPNTRYPVVVRFNKVNYAGVSTNNYALDEILEVK

SEQ ID NO: 369004 - protein, 94 aa, Zea mays
  Clone ID: MRT4577_99706C.1.pep
VLLLRRDRFRCTLHPSLPPWGRLLISGSNVSVQSVDDKSVLIPGGPWNLNHSPYNRSGQIVRSVSPPATRLLTARSGPTRYAESDRPSEPTSQE

SEQ ID NO: 369005 - protein, 139 aa, Zea mays; identical to SEQ ID NO: 333058
  Clone ID: MRT4577_99707C.1.pep

SEQ ID NO: 369006 - protein, 119 aa, Zea mays
  unsure (1)..(119): unsure at all Xaa locations
  Clone ID: MRT4577_99708C.1.pep
XXXFLQLGPNYSXMXNIYHHXXXFFLXXIXXXXXIPXNIIKHFNSTKYLISXXISXPXSXTSTSPLXLLKXIIQLQTTLTSIIHSIKNIXTKXXILXFFKXNXFNFXKISPKNSIKFYS

SEQ ID NO: 369007 - protein, 139 aa, Zea mays; identical to SEQ ID NO: 333058
  Clone ID: MRT4577_99709C.1.pep

SEQ ID NO: 369008 - protein, 110 aa, Zea mays
  unsure (1)..(110): unsure at all Xaa locations
  Clone ID: MRT4577_9970C.1.pep
LLETHLVSVFPAPDXQVFYXKMKGDYXYRYLAEFKTGAERGGAAENTMVAYKAAQDIALAELAPTHPIXLXLGLDKAXFYYXTLNSPNRGGSLXXXXWGPAPPRPAPPPP

SEQ ID NO: 369009 - protein, 136 aa, Zea mays
  Clone ID: MRT4577_99710C.1.pep
MASTNMASATSRFMLAAGVPTGSSGGRVNFASAPNRLGRRLVARADNEAAAAEAAEGEGAVATKPKAEKPPPIGPKRGAKVKILRRESYWYNGIGNVVTVDQDPNTRYPVVVRFNKVNYAGVSTNNYALDEVLEVK

SEQ ID NO: 369010 - protein, 33 aa, Zea mays
  Clone ID: MRT4577_99711C.1.pep
ILRCLNSEITHINRPSLKCPHSKWQMYPPCCIK

SEQ ID NO: 369011 - protein, 89 aa, Zea mays
  unsure (1)..(89): unsure at all Xaa locations
  Clone ID: MRT4577_99712C.1.pep
GRDIIPARTHQXSSRSAPRPSLPQQAQASLLSLSAPMARFQLAAVAMAMLFAAAAAQAPTVTPTPAPNASPPPATPPPTPAPIPPPLPP

SEQ ID NO: 369012 - protein, 92 aa, Zea mays
  unsure (1)..(92): unsure at all Xaa locations
  Clone ID: MRT4577_99713C.1.pep
MGCDDKSGCAIPCPSRTTSRCTSXSSGQGPHTTCVMGKHWLCTSVLFATHPKPNLLPQQKANCSCGTMHQIISLRIHLLLAHRPFATVLPTH

SEQ ID NO: 369013 - protein, 41 aa, Zea mays
  Clone ID: MRT4577_99714C.1.pep
DQSTDLAPRRRKQKKKKKKKGKKKKKKKKKKKKKKKKKKRK

SEQ ID NO: 369014 - protein, 128 aa, Zea mays
  Clone ID: MRT4577_99715C.1.pep
VPSGSAGETICFLPDLHGAPLHGDAPLCEPPRRTAPRFRAGGGPVPDGRSRSQSAGVTAAPRARTRQLPRVAHACCSRARRAASHAGAHEAEAGGSLTVPVGTGGGLGLLPPRRADRPALDPERDHRG

SEQ ID NO: 369015 - protein, 87 aa, Zea mays
  Clone ID: MRT4577_99716C.1.pep
MNLLSAETVFFISISATSRGSVPWQVVFIYDVSLSFIEYGKAHASYRTTQVAPMIEIYEHGDSRSFWPVGAAVAWVRLLWALELSVV

SEQ ID NO: 369016 - protein, 60 aa, Zea mays
  Clone ID: MRT4577_99717C.1.pep
ACSRDYYRAFCSRDTDRPHRTQRKNSSLEWYGRTPRPIMFTLTPFLLIDMTTKEGLTPDG

SEQ ID NO: 369017 - protein, 334 aa, Zea mays
  Clone ID: MRT4577_99718C.1.pep
VVLFNFGDSNSDTGGVAAAGGIRIMPPEGRTYFHHPTGRLSDGRVIIDFICESLGTRELNPYLRGIGSDYSNGVNFAMAGSTVTHGVSPYSLNVQVDQFVYFRHRSLEMFERGLEGPVSKEGFESALYMMDIGHNDMVGVAHTPSDQWDKKITEIVGEVRQAISILYDNGARKFWIHGTGALGCLPALVVQETKGEQDKHGCLAGVNRAAKAFNRKLSQLCDDLRFHLKGATVVYTDMFAIKYDFVANHTKYGIEWPFMVCCGNGGPPYNMKQGRPGCGDLCPPEAKVVSWDGVHFTDFGSGLAAKLAMSGEYSKPRVKLASLIHGGSKKTSDS

SEQ ID NO: 369018 - protein, 76 aa, Zea mays
  Clone ID: MRT4577_99719C.1.pep
QDERESDGALATVLDVLKRIHATFFDMAAETDLSSRDIRQVIKTLRKEILQGCKIVFSRVFPNNTRPQEQMVWKMA

SEQ ID NO: 369019 - protein, 57 aa, Zea mays
  Clone ID: MRT4577_9971C.1.pep
KINFQTREPGQIQMGQFFFPWLWNSSNFPPRSFAPKIYSGPPKWVKCSNSLVCNGVV

SEQ ID NO: 369020 - protein, 231 aa, Zea mays
  unsure (1)..(231): unsure at all Xaa locations
  Clone ID: MRT4577_99720C.1.pep
TPSPRRRSPQPVYRPNLTSTDASSSSPDQIPARAGSSNQLFCCCSLLRRQKEKMLYEIHSHAQIQDLQARSDELGHPEGHMGVKLVSLESVRIARESYALLCPLIKEPMSWACLQLNSLSVVAPLSLEIQMLEHDVLPQLMVQESKLERGALEALLLMQNSAIKLLHLAKCFKESLGILQDLVSCRAEDVSIMLNDIVLHVLRGNISWLQARXPVLAGLVTIMLETPXSFL

SEQ ID NO: 369021 - protein, 44 aa, Zea mays
  Clone ID: MRT4577_99721C.1.pep
QTNRGGGLYNCFAHPNHHNGRILALKNTQKSNEKGGIFTCRYQS

SEQ ID NO: 369022 - protein, 39 aa, Zea mays
  Clone ID: MRT4577_99722C.1.pep
HESGTCLANNTASGMATRAYEYHAGLVNDCSAYIGYNAL

SEQ ID NO: 369023 - protein, 159 aa, Zea mays
  Clone ID: MRT4577_99723C.1.pep
MALPARLVRVALLLLVALSFCAAGTHRAPREPHRALHSGQDTHGLVVRRSVAEAPADINVTTNSSFVLAEHRTFRKDPLNAFNRYEGGWNISEVHYWASVGYTAYPLFVVALLWFVLFFLLMLGISCHHCCCPHHSYNYSRIAYALSLILLILFTCAAI

SEQ ID NO: 369024 - protein, 81 aa, Zea mays
  Clone ID: MRT4577_99724C.1.pep
FEWLCLCKAIVKGSGRLNDLIGFKKIMGAAGLKVSELDEWSGALGGYWLQDGERWASFQFYWHCHGVSGGRLLGGVSCYWV

SEQ ID NO: 369025 - protein, 152 aa, Zea mays
  unsure (1)..(152): unsure at all Xaa locations
  Clone ID: MRT4577_99725C.1.pep
MSLFRIPSALYLKKGTMRAKGKGIESEAADKVTARSSQAALQFPVAIIDKFLIPAKYAERVPPVPPVYLPDVLEYLAADGLELCGNAARDSNNTRIVPCHIQLGVRNYEDVSRLVHTVXTIGSAEDMPCIHXLLLPKKGVHCSDQGANVDQD

SEQ ID NO: 369026 - protein, 72 aa, Zea mays
  Clone ID: MRT4577_99726C.1.pep
HRRRSPSPSRSTRPKRPGLHGWPRPACDGIPSTSTTRARRCRPHTPRRRTRRRRRVRRVSRRPLAAAAAATS

SEQ ID NO: 369027 - protein, 207 aa, Zea mays
  unsure (1)..(207): unsure at all Xaa locations
  Clone ID: MRT4577_99727C.1.pep
ETXDGREGEAQRXKRLILLGCQKLRAILWPPRSSSILETLDVFCVSTTPSTASGQEGAHLCKWEEKRKEATSASTAESSSLDRNWYICVRDARLLRSLDVFYTYENNRCSIGWPARVEFTTPPASGDLVAAQGVNILQQSIHVVDVYARDMITHNQLIHDEDATAGDEDXEGAIHWMXDCPTTRTMHGHGLYIHVQAEDDEQEGEWT

SEQ ID NO: 369028 - protein, 118 aa, Zea mays
  Clone ID: MRT4577_99728C.1.pep
ALLIAPSADQVGAVCLPVGCSAHTPPLPMLLKLVKQLDPKIVVAIDHGRDQSDLHILQHLMNSFQPLIELLDSLDADGTNADAANKNKKVLNQPRVHDALLDRPYVKRQWSCWQTLHS

SEQ ID NO: 369029 - protein, 122 aa, Zea mays
  unsure (1)..(122): unsure at all Xaa locations
  Clone ID: MRT4577_99729C.1.pep
ATPPHTGHDGSAYRAPRKRAXHQTPYSQSLGCVWDLTQELDGNGTFERTEIHLLRLXPRHAYHRPRGVIRNQAMHTKMRHVNPYLDHHATIVADCNLLLXRPADMSIFMMSAADRRPAKEEE

SEQ ID NO: 369030 - protein, 131 aa, Zea mays
  Clone ID: MRT4577_9972C.1.pep
NNFFFFFFFFCVFLELFRGFSNFSGKETPTGQGEHETRGKTNTGKQRGKTQNQTKPGGKANPSPPGEGQTHPARAGGNRGPGVHQPNGLEGQDHQPQGEHRGGQAKTRSEGTRGPKTKLVQREALPKKSPQ

SEQ ID NO: 369031 - protein, 78 aa, Zea mays
  Clone ID: MRT4577_99730C.1.pep
MAGKGKAIGSGAPKKATARSSKGGLQFPGGRIPRFLKGGKHAQRVGPGAPVYLAGGLENLAAEGLELAGNAARDNKKT

SEQ ID NO: 369032 - protein, 155 aa, Zea mays
  Clone ID: MRT4577_99731C.1.pep
AVTKVKSGLPAESSSSCEFDLYQLNAEVLRLAGANVQKGENVTHAGVILPGVPKVVLMPEFGVTLKEIRNKIKGNVTITPQSTVVLDGDIALENVNIDGSVFIFAEPGKQREIKDLNVTGKNYVELVDLEANNNEPAYKKIREYTAANREQATYI

SEQ ID NO: 369033 - protein, 174 aa, Zea mays
  Clone ID: MRT4577_99732C.1.pep
MAARIGADGKAMARRGRVELRRIEDRVSRQVRFSKRRSGLFKKAFELSLLCDAEVALIVFSPAGKLYEYASTSIEDTYNRYQQFSGEGRNINDDRNRNDNKDEASSDLQLMLSKIATWSPQSNADESDVDELEKLENLLRNALKDTRSTKIQMLAKQNSGASTSGQKSPEQGTA

SEQ ID NO: 369034 - protein, 350 aa, Zea mays
  Clone ID: MRT4577_99733C.1.pep
FGTRADLNQHLFSAFIARRCHGPGEAALEAPLSVRIKSRTPRRRAESTTTRILCRGAEAQQGSGGGRRREPLRRGAVSARLPVPDHIRRPPYVGTAAVPEVCPDRQVHDGESIMRMLDACELAARVLHHAGAMVKPSVTTDEIDRAVHQMIVDAGAYPSPLGYGGFPKSVCTSVNECTCHGIPDSRELQDGDIINIDVTVYLNGYHGDTSRTYLCGEVDDATKQLVKVTEECMMRGISACRHGASFKEIGQRISEHAEKYGYGIDPFVGHGVGRMFHCEPIIWHTYDYEPGFMVAGQTFTVEPTLSMGSTQCVVWDDGWTAVAADGSLSAQFEHTVLVTGDGAEVLTGFP

SEQ ID NO: 369035 - protein, 40 aa, Zea mays
  Clone ID: MRT4577_99734C.1.pep
HQSLVKRALFLILPTHMFYIEASSPSGGLVTSMYTTLLHG

SEQ ID NO: 369036 - protein, 220 aa, Zea mays
  Clone ID: MRT4577_99735C.1.pep
MAARVPAADLNQHLSSPFIARRCHGPGEAALEAPLSVRIKSRTPRRRAESTTTRILCRCSRSLLSYPRRAVPICAQNQTRSSNSLTIARALTRSNRRGAEAQPGSGGGRRREPLRRGAVSARLPVPDHIRRPPYVGTAAVPEVCPDRQLHDGESIMRMLDACELAARVLHHAGAMVKVSGDWRARPPDLVSPPVVEWRNLRPVLFWPRVQPLVTTDEIDR

SEQ ID NO: 369037 - protein, 214 aa, Zea mays
  Clone ID: MRT4577_99736C.1.pep
MFPMASSSLSSPPLSLILLRPLPCIPVLLLRQRKPFPAVRVEARSQQRLQRRPVTGQWRRSCRRGGGYACFSYNAKNKTPPPSDKSSDEWAIVRRWDVPWEWQTVVLSMVGCGVSFVLTGLVEQLALQELGFKAVEATIDEKAEILFFGQLSVTVVVLGVIFGITNTFRPFPDDVFRYDIKEPFKLQNGWLLWAGIGLFGAVISIALAGAAMTY

SEQ ID NO: 369038 - protein, 95 aa, Zea mays
  Clone ID: MRT4577_99737C.1.pep
MALQDGDIINIDVTVYLNGYHGDTSRTYLCGEVDDATKQLVKVTEECMMRGISACRHGASFKEIGQRIRSRSLDLIEHTSVSFLKKKQLISVNRT

SEQ ID NO: 369039 - protein, 37 aa, Zea mays
  Clone ID: MRT4577_99738C.1.pep
LPSPGSVWLCEHPAIVGYVRPPQCARTYGLIAVTPIL

SEQ ID NO: 369040 - protein, 356 aa, Zea mays
  Clone ID: MRT4577_99739C.1.pep
MSDGAGSRTGVAGALGLSVTSSVAIVICNKYLISTLGFFFATTLTSWHLMVTFFTLYVAQRLRFFEPKPIDARTVISFGLLNGISIGLLNLCLGFNSVGFYQMTKLAIIPFTIVLETLFLSKKFSQSIKASLMVLLLGVGIASVTDLQLNLLGSIIAVLTIAATCVGQILTNQIQRRLKVSSTQLLYQSSPYQSAVLLVTGPFVDKLLTKRDVFAFSYTTQVVVFILLSCSIAVCVNFSTFLVIGTTSPVTYQVLGHLKTCLVLSFGYIILKDPFSARNVVGILIAIFGMGLYSYYSVVESRKKTEDASSLPVAAQMSEKDSAPLLGAKSSPRTENKAEETFDYMPRTAKSAFTGR

SEQ ID NO: 369041 - protein, 73 aa, Zea mays
  unsure (1)..(73): unsure at all Xaa locations
  Clone ID: MRT4577_9973C.1.pep
KPGPTHASGRIFYQYPLVFWSQVAAHYAXVSXASNCYPGSLDAQKVAGKIVVCVSTDPMVSRRVKNLVAEGFI

SEQ ID NO: 369042 - protein, 183 aa, Zea mays
  unsure (1)..(183): unsure at all Xaa locations
  Clone ID: MRT4577_99740C.1.pep
TPLNHPLYPPARLGFCHHGRRRGRRPEAPLPPRLLELALRVPPPRRCPGAVAAAPGRRRGGLPPRLPARNGAATWRGRIRRGTTAQAHADSIAADRVLDYAXYSIEMEKYGLEVAPTNYTTDYCIXLLSSRRELKIRAMDHEYEGTDEVTGEDFSVEPXDERRPFPALMDDGLIRTTTGNRVF

SEQ ID NO: 369043 - protein, 47 aa, Zea mays
  Clone ID: MRT4577_99741C.1.pep
NQCMRNMRFLIFTRRPKSMYFVTLILNSNLKWRFVLYINYYYNHNLN

SEQ ID NO: 369044 - protein, 139 aa, Zea mays
  unsure (1)..(139): unsure at all Xaa locations
  Clone ID: MRT4577_99742C.1.pep
VLMELMKXRSDGLDPPYAQAVQVRQPDPSTGRMKVANKQSSRLVWETCLGELKSLGRVAARLIFLHATSRGFRCTPSMVRWLSAPRRLAGGNGRAHRLVFVAANSKLERGDFSNDEDKDAELLADGDDDVANIPGTVEP

SEQ ID NO: 369045 - protein, 102 aa, Zea mays
  unsure (1)..(102): unsure at all Xaa locations
  Clone ID: MRT4577_99743C.1.pep
MAKDIGAGAAHEGYGYXDXPPAPLLDSEELTKWSLYRAVIANFVATLLLLYITEATEIGYKHQTDAAAFNPDSTIGKVGQHRIIXDYDGMILILIYWTVLES

SEQ ID NO: 369046 - protein, 113 aa, Zea mays
  Clone ID: MRT4577_99744C.1.pep
MKVIAAYLLAVLGGNTSPTADDVKSILESVGAEADEEKLEFLLTELKDKDITEVIAAGRERLSSVPSGGGAIDMGAPAAVAGGGAAPAEEAKKEEKVEEKEESDEDMGFSLFD

SEQ ID NO: 369047 - protein, 113 aa, Zea mays; identical to SEQ ID NO: 369046
  Clone ID: MRT4577_99745C.1.pep

SEQ ID NO: 369048 - protein, 73 aa, Zea mays
  unsure (1)..(73): unsure at all Xaa locations
  Clone ID: MRT4577_99746C.1.pep
VKDWXPFKDHVEIXFNRVLGFYVRSEDDGVEAAKAVKQSNVKXLSISKNKRRQDRTCALEVWERLEEFMRART

SEQ ID NO: 369049 - protein, 88 aa, Zea mays
  Clone ID: MRT4577_99747C.1.pep
CDAFIRKTQGEVHAPPCARSGGLARSMLRYAAPHASLCSMRESHRFREPQPRWTRAPDAYGDVSCSHSGVKKFVDHRGAPRTPPRSNT

SEQ ID NO: 369050 - protein, 53 aa, Zea mays
  Clone ID: MRT4577_99748C.1.pep
KLCRAYFVTNFGVVFFLNQGEGYWLVNGLTWVPGPNLNPDEWGSSESEGEWIN

SEQ ID NO: 369051 - protein, 81 aa, Zea mays
  unsure (1)..(81): unsure at all Xaa locations
  Clone ID: MRT4577_99749C.1.pep
MVASFPXQARVAALKQLEEHRVNPSYMTVYQACKEDLPVYTSVYDDRSAKDIIGRRGLKCIDALARMYGNTAEGQGVTVEL

SEQ ID NO: 369052 - protein, 82 aa, Zea mays
  Clone ID: MRT4577_9974C.1.pep
SQGSALTQHYPNLKSTHSLESAKFSGAAALDWLEKQNKRGLPVEKEEDKWRQADPDEAPDAGRRGGSSGHPRRRWEGGDPGR

SEQ ID NO: 369053 - protein, 68 aa, Zea mays
  Clone ID: MRT4577_99750C.1.pep
KYLFVTPKCIKGSECFPKMFLLGVWPNAKSPPKKLWHPNIHSKDFNLGRKLNLLKLKLKLLPLFSRRP

SEQ ID NO: 369054 - protein, 34 aa, Zea mays
  Clone ID: MRT4577_99751C.1.pep
SHSTHKSLALTIAIIDLSTIDGWPTLSLSFPPSP

SEQ ID NO: 369055 - protein, 50 aa, Zea mays
  unsure (1)..(50): unsure at all Xaa locations
  Clone ID: MRT4577_99752C.1.pep
FLVIMLLLAAVVVVGCNIAAVEALSSAGRRLCADMXVFTARPYPPLVSGY

SEQ ID NO: 369056 - protein, 93 aa, Zea mays
  Clone ID: MRT4577_99753C.1.pep
GGDKFGGPLPWEKRLKCQHSYFTGQTKPIKPGGFTAPKKPHSGGTKQPGTKTPSNQTQGGGQTSPQNPGPRGGGLPPPNQTPKAKKRGALGFG

SEQ ID NO: 369057 - protein, 234 aa, Zea mays
  Clone ID: MRT4577_99754C.1.pep
MMSQGKSSGRGPELGDNNEDLNPISEDPINEDEEFHESEYDLLSSQDLEEFAKDDEGVVPPCQGKSASLLWVLKLRVLEKLKLKNKLRSSRLESNDDMKIADKAATRAMAKDAFMNKDLGIDLGNSINKSIANLELIKSLELSRNVLAFRYVKNSVEHNLQVGSDSELDKSIQDENGNNQLTDLDDVMVLRKGRKIRYKKNSVKKKKKKSSSKIRYSPNKGKRIPSVSNLNYLE

SEQ ID NO: 369058 - protein, 273 aa, Zea mays
  Clone ID: MRT4577_99755C.1.pep
MGKKQKKPGKGKEKTERKTAKGEEKRARRDSRKVGEEDDIEAILRSIQKEEAKKEVHVEENVPAPSPRSNCSLTVNPVKETELILYGGEFYNGSKTFVYGDLYRYDVEKNEWKLVSSPNSPPPRSAHQTVAWKNNIYMFGGEFTSPNQERFHHYKDFWTLDLKTNQWEQILAKGFPSARSGHRMVLYKHKIVLFGGFYDTLREVRYYNDLHVFDLDHFKWEEIKPRPGCLWPSPRSGFQLAVYQDQIYLYGGYFKEVSFDKEKGTVHADMGAL

SEQ ID NO: 369059 - protein, 77 aa, Zea mays
  Clone ID: MRT4577_99756C.1.pep
RECFSEEQVAPGKLCTDDPLDSQFDCFEQQQHWGQQYVPLMLVVFSQQTFSCLIHPFLLRCISTMFLNSYTVVISVS

SEQ ID NO: 369060 - protein, 125 aa, Zea mays
  unsure (1)..(125): unsure at all Xaa locations
  Clone ID: MRT4577_99758C.1.pep
IKGQTRSLVGGRPXHYILPNFFFLTQQTPHPGAGGKKKKTQTPNIETNPSEKTLTPQPNTKNTGRPTQKHQEPPPPEPRAEAPQPQGRAPPLHQGQAQETQPKRKTKRTPRTRWGTRQNQKTAST

SEQ ID NO: 369061 - protein, 95 aa, Zea mays
  Clone ID: MRT4577_99759C.1.pep
GPRGVSAPIFFNCPGAPPPAPVFFLGRIMGVKLPRESLGQTIGVELISGHNLFFLGGPGKKIQIFLGVPNKSLKKNNPCVFLGPRKHLFKMILPP

SEQ ID NO: 369062 - protein, 368 aa, Zea mays
  unsure (1)..(368): unsure at all Xaa locations
  Clone ID: MRT4577_9975C.1.pep
MAPPLLPARFVAASVALLAVAFSSSLTRPSGAYDPLDPNGNITIKWDVIQWTADGYVAVVSLYNYQQYRHIQAPGWRLGWVWAKKEVIWAMTGGQATEQGDCSRFKASVLPHCCRRDPEVVDLLPGTPYNTQTANCCRGGVLASWAQDPSNAVASFQVSVGQAGSTNRTVKVPRNFTLLAPGPGYTCGAAKLVKPTKFMSLDGRRSTQAHMTWNVTCTYSQFLAQRSPTCCVSLSSFYNDTIVSCPACSCGCRQNNSSTAAPGSCVEXKXYFASTAMLWGIKYYNDLLMTAGPDGNVQSELLFRKEPSTFTFHKGWAFPRRVYFNGDNCVMPPPDAYPWLPNAASPRLSPSLLLPLVAAAWTAFAVLS

SEQ ID NO: 369063 - protein, 84 aa, Zea mays
  unsure (1)..(84): unsure at all Xaa locations
  Clone ID: MRT4577_99760C.1.pep
ARPSRSQHPRELHRPGPHRRGACPTSPPPGSSLAAVAEMGFVYFVGRVLLVGAFILSDYHKFNEFPAKSKGGGWXIPPKYNXFP

SEQ ID NO: 369064 - protein, 128 aa, Zea mays
  Clone ID: MRT4577_99761C.1.pep
RGPNEDLHRARLSPQGHRHRRRVNGCQPPACRRVPCHQEVLLGAIDDEFGLETSQVHPPGRRHHHVREQRPLHRTTAIFHEDEVTESRCTPSIISQEEHLHAADHTYFVTRHRVGTLTASTASCIKDS

SEQ ID NO: 369065 - protein, 200 aa, Zea mays
  Clone ID: MRT4577_99762C.1.pep
MFDNIDFTQPSLWVSAISIAFNPTFWNIAAQSEYHNKVITKLFSGNARYGCYALAVAIFSLGIFRDYLYNEALADQPTSPLLQSPLVKYSAIPLFLTGNTLVLTSMWALGVTGTYLGDYFGILMDAPVTSFPFNVSDAPMYHGSTLSFLATALWYGKPAGLFLTGCVAVAYAVARQFEDPFTGMIYAKRDEERAKGKKGL

SEQ ID NO: 369066 - protein, 49 aa, Zea mays
  Clone ID: MRT4577_99763C.1.pep
FFLKAPNISHATLLHSKSFQSYSREPKHACFKLPNYQPILKSSSLSHAN

SEQ ID NO: 369067 - protein, 95 aa, Zea mays
  Clone ID: MRT4577_99764C.1.pep
LVSGSRKKHLTIGRTRRNRSSTQLKATAATMSTIRAHSFFCISVPSIFFVLYPIITFLSNNCIVCFMQKSMMMLYFESERMFQPKNLNSGIIYAL

SEQ ID NO: 369068 - protein, 108 aa, Zea mays
  unsure (1)..(108): unsure at all Xaa locations
  Clone ID: MRT4577_99765C.1.pep
RELKIFGYLSSKKTMEXINPGNALMENLCKGGEPRKNRKFVKDLERFFFFLEMLPXGLNLYFPNTFGKKVPPMLKLGFNIDEDKVLKKKNDPPPHEDEGGKKKMEEVG

SEQ ID NO: 369069 - protein, 332 aa, Zea mays
  Clone ID: MRT4577_99766C.1.pep
MCSCACARLLPRLFSLAPGPNLRPAFPHSPTPARSRAVVALAGAASRDDAPAPLSSFDFLALKRELDEEEEAVVAVDAKEGAGAVNEDDGELGAERSAGGTRRRRRRQMARRSALLAKQVISVTSARSLGFVSQLWIDTASWAVALVEVKPSLLSGEAEKFLFEDIYQVGDVVLVANESVIDNEHKLVGLHSLVGYNVVTSRRRNVGKVRGFTFDISSGAMESLELDSFGLSIVPSSLVSTYCLFVEDVLDIVSDTVVVHEDAVSRVQRLTQGILGTQNIHGPGGEIDEYGRFGGRGRGRRRRANGQGKSGGRELRSEPKHPEDEWELPMDY

SEQ ID NO: 369070 - protein, 71 aa, Zea mays
  Clone ID: MRT4577_99768C.1.pep
CKGGMNPTSSIVSAPSSSARVLGGAQPYRPCFACCLREGSFFSRTQATGTSVCRACFCALLCARLTYSAVS

SEQ ID NO: 369071 - protein, 346 aa, Zea mays
  unsure (1)..(346): unsure at all Xaa locations
  Clone ID: MRT4577_99769C.1.pep
RKNGAVMIQFGHQMPDYDSPATQSTSETSHQEASGMSEGSLNEHNNDHSGNLDGYSKSDENKMMSALSLGNPETAYAHNPKPDRTQSFAISYPYADPYYGGAVAAAYGPHAIVSDLHASSLLFHYLLPVLDDALCPLXDTLLGNAVSTGAFFLFFLCVIAFRVLHLLXMHPQLVGMVPSSRVPLPIEPAAEEPIYVNAKQYHAILRRRQLRAKLEAENKLVKSRKPYLHESRHLHAMKRARGTGGRFLNTKQQPESPGSGXPRTXRVPATASGGLFTKHEHSLPPGGRHHXTREGAVSREPRHWQLILGLSAIRLGSPSSETELSATTVTVTKLGVPGLAVVLFYY

SEQ ID NO: 369072 - protein, 86 aa, Zea mays
  Clone ID: MRT4577_9976C.1.pep
EDPMEMNPMTLLKFHRRMNPDAGWRRQLNRYRNIPGAAALHERTSTYRTCCCPTSRSRTRTIIFEVNSVDRRRATRRSGRVCCPKH

SEQ ID NO: 369073 - protein, 292 aa, Zea mays
  unsure (1)..(292): unsure at all Xaa locations
  Clone ID: MRT4577_99770C.1.pep
MRQNGAVMIQFGHQMPDYDSPATQSTSETSHQEASGMSEGSLNEHNNDHSGNLDGYSKSDENKMMSALSLGNPETAYAHNPKPDRTQSFAISYPYADPYYGGAVAAAYGPHAIMHPQLVGMVPSSRVPLPIEPAAEEPIYVNAKQYHAILRRRQLRAKLEAENKLVKSRKPYLHESRHLHAMKRARGTGGRFLNTKQQPESPGSGXPRTXRVPATASGGLFTKHEHSLPPGGRHHXTREGAVSREPRHWQLILGLSAIRLGSRSSETELSATTVTVTKLGVPGLAVVLFYYY

SEQ ID NO: 369074 - protein, 58 aa, Zea mays
  Clone ID: MRT4577_99771C.1.pep
VVPFPGAEERESARATLGGGGTAARQAGNAPSTLFFTRYWNLILTHIYHFCLLIPSTH

SEQ ID NO: 369075 - protein, 108 aa, Zea mays
  unsure (1)..(108): unsure at all Xaa locations
  Clone ID: MRT4577_99772C.1.pep
MGKMNKSMDQNCCIYCCLQLLDDDTLXGTHDKGRHWKCHVCHKKLCAGSGVAIHVLQVHMEYLTNVPKAXPAREVSDIEILGMQVITAHVLXVHYGIYEGPASMGRYV

SEQ ID NO: 369076 - protein, 101 aa, Zea mays
  unsure (1)..(101): unsure at all Xaa locations
  Clone ID: MRT4577_99773C.1.pep
ASRESGGLHIKNPCSVNHXPIFKSYSLPPHECGYPGSVFNPLNFAPTLEANENVLANERLATLALLALLMQHNVTCKGPCDNLLQHLADPCDNTIMQTLSG

SEQ ID NO: 369077 - protein, 53 aa, Zea mays
  Clone ID: MRT4577_99774C.1.pep
IDYDISVQMIELYNEQVRDLLQDSGNRRLEIRNTSQKGLAVPDASIVPVTSTS

SEQ ID NO: 369078 - protein, 91 aa, Zea mays
  Clone ID: MRT4577_99775C.1.pep
GAHFEGWQEGLITLLPYYKYQPNSDQYHWCFDSAGSDKKRAPAWCDRILWRGKGLKQVQYGTCSYRLSDHRPVRAVFHAECDALSEAVSHK

SEQ ID NO: 369079 - protein, 131 aa, Zea mays
  Clone ID: MRT4577_99776C.1.pep
YEGKKNLNTATNRTMPKKTSTSSWIPVLYPHAPLLHTTQSAFRGRDRETEKKNNNNFMFVSEEISSWLYSLGPILRPVLSRFGGTRAPSSISITLWLNRRLITSVALLAAGRSVRRGSSLAMFLLVRHRLR

SEQ ID NO: 369080 - protein, 661 aa, Zea mays
  unsure (1)..(661): unsure at all Xaa locations
  Clone ID: MRT4577_99777C.1.pep
INNCVLFQCRYIRAFFVYGGCNLVLAAAAAAICAYIAPAAAGSGIPEVKAYLNGVDAYSILAPSTLFVKIFGSILGVSAGFVLGKEGPMVHTGACIANLLGQGGSRKYHLTCNWLRYFKNDRDRRDLITCGSAAGVAAAFRAPVGGVLFALEEATSXMRHFSFWXTFFTTAVVAVVLRGLIEFCRSGKCGLFGQGGLIMFDLSSTVARYWSPVRLALIVLGIIGGIFGGLFNYLLDKILRVYSIINERGAPFKILLTITISIITSMCSYGLPWLAACTPCPVDAVEQCPTVGRSGNYKNFQCPPGHYNGLASLFFNTNDDAIRNLFSNGTSTEFQMSSLFIFFTAIYCLGLVTYGVAVPSGLFIPVILAGATYGRIVGTLLGSISDLDPGLFALLGAASFLGGTMRMTVSVCVILLELTNDLPMLPLVMLVLLISKTIADSFNKGVYDQIVVMKGLPYMEAHAEPYMRHLVAGDVVSGPLITFSGVEKVGNIVHALRLTGHNGFPVLDEPPITETPELVGLVTRSHLLVLLNSKNFMKGRVKTSGSFVLRRFGAFDFAKPGSGKGLKIEDLDFTDEEMDMYVDLHPITNTSPYTVVETMSLAKAAILFRELGLRHLLVVPKTPDRPPIVGILTRHDFMPEHIHSLFPNLNPHKYHSASMAG

SEQ ID NO: 369081 - protein, 476 aa, Zea mays
  unsure (1)..(476): unsure at all Xaa locations
  Clone ID: MRT4577_99778C.1.pep
QITRSRLVTNKLLHRCQQLHGHGSVSGVSETLGKRPLNGNKDTLVYSVFASTWNVGGVTPSDGLDLEDWLDTRANAYDIYVLGFQEIVPLNARNVLGPRKSRVSAKWNSLIGEALNRRCREEGGANTNSSAKDDEGSVEGSQGFRCIRSKQMVGIFTSVWARSSLRPLIRHLDASCIGSGIMGCLGNKGSVSIRFVLHDTSFCFVCCHLASGGKQGDVLLRNLDVADILARTRFPGLAAQELPEKILDHEXCTLAHPSNCFNLSLIFPSSRIXSTISDPXLMVXLMXMFTFLLNVPVSFVNEKKRRGVSEMASRINCRHHPVHHVSVDCLSKQYVFXSRLCSQVVLLGDLNYRISLEEAETRSLVRAKRWPVLLENDQLLFEFSRGRHFEGWQEGLITFSPTYKYQPNSDQYHWCFDSAGSDKKRAPAWCDRILWRGKGLKQVQYETCSYRLSDHRPVRAVFHAECDALSEAVSHK

SEQ ID NO: 369082 - protein, 57 aa, Zea mays
  Clone ID: MRT4577_99779C.1.pep
PVPLLWHQSSPSTICVCTRVVSIMGTLRFPHMASTAIESLRYHSMIYTDPADPDSMR

SEQ ID NO: 369083 - protein, 88 aa, Zea mays
  Clone ID: MRT4577_9977C.1.pep
TTDLVSMCCSRPVLRTPAAAMTGVRLDSEPESYSPGRESSGPSDTPQVRFCDSGKLTWSIAGRGMLTPAARWSSPSAARTGKPRASLQ

SEQ ID NO: 369084 - protein, 91 aa, Zea mays
  Clone ID: MRT4577_99780C.1.pep
NGTFERGAPPGGGAKLQGPPGKASTSSKWGGQTKPKFFLPRCPSRHWRGPLTKTPTLQEKKHYPIGGLPNPPDMSIGPCQYATTNAFAHSR

SEQ ID NO: 369085 - protein, 96 aa, Zea mays
  unsure (1)..(96): unsure at all Xaa locations
  Clone ID: MRT4577_99781C.1.pep
MLLCSSHYPNGRKVNVLXFRHTIQCKTRASRWCVLCKKMWYMLQLHAPACKDSDCNVPWCMDLKEHLIRLQHQSDSTTRAAVNEMMRHRATEVASN

SEQ ID NO: 369086 - protein, 103 aa, Zea mays
  Clone ID: MRT4577_99782C.1.pep
MATAEEGGNGLEFLSDPVDRFPLPDLASSDLTPTGEPDTGLTQSAAESSMGYVGDLPLTIQLPMNNGCEELSLSAADSQQSTGKDDPQAPGWTKREKKATVNS

SEQ ID NO: 369087 - protein, 117 aa, Zea mays
  unsure (1)..(117): unsure at all Xaa locations
  Clone ID: MRT4577_99783C.1.pep
TEKMXCEEDTLSAIKEERNKVRQLQEELDIDVXLVHGXEPERNDLVDYFSEQISTFWSTGNGWAQTYGSRGVKPSEIYRDVSRPDDLTVFWTKTEPYMTTSPLKGMLPGPLRTFNWC

SEQ ID NO: 369088 - protein, 92 aa, Zea mays
  Clone ID: MRT4577_99784C.1.pep
GNDISHWVPKHVNGPLEGIHVSSISRGPWHTAVVTSAGQLFTFGDGSFGVLGHGDRESISVPREVESLKGLRTVRAACGVWHTAAVVEVMAG

SEQ ID NO: 369089 - protein, 279 aa, Zea mays
  Clone ID: MRT4577_99785C.1.pep
WVPRGRPGTGAANNTCAHKGCRRDIFPFSYNYVPFDQLPPMCPDGQFCPDEGDHCMPVAAQGEGCQKDRDDECAHPPNWRDLSGWLNTNGSICLNFTCEYANITLGQTCINDNTRYTGYTNEGVQYAHIVSRDNCANGLYCDGSTLQCLKVKPVGAACSGNKECMSYNCPDDKKCGRNADEPIHPPTYSFVLIGLGIVILIVGVFVGLWFVHRKQRAENQRRLEQYWNEQVAYRQSIMSMSNAKKSLLGQVAKRRRFSSHPPWRPSPAHVILTSTRTLK

SEQ ID NO: 369090 - protein, 256 aa, Zea mays
  unsure (1)..(256): unsure at all Xaa locations
  Clone ID: MRT4577_99786C.1.pep
LQVPVRNSRVDPRVRMASLLRMFQSTAGSGGVQEDALMAVSTLVEVLGGEFLKYMEAFKPFLGIGLKNYAEYQVCLAAVGLVGDLCRALQSNILPFCDEVMQLLLENLGNENVHRSVKPQILSVFGDIALAIGGEFKKYLEVVLNTLQQASQAQVDKSDFDMVDYLNELRESCLEAYTGIVQGLKGDQENVHPDVMLVQPRVEFILSFIDHIAGDEDHTDGVVACAAGLIGDLCTAFXKDVLKVVEARPMIHELLT

SEQ ID NO: 369091 - protein, 58 aa, Zea mays
  Clone ID: MRT4577_99787C.1.pep
GFSSRIGKPSIAHRPPFNVRSLSPPDTLRCFLPAAPCRVWHESFHSIMHHFWLVEKMG

SEQ ID NO: 369092 - protein, 57 aa, Zea mays
  Clone ID: MRT4577_99788C.1.pep
VSSMLMVSIADHQRFSTQQHLDCTPVDSPVGSTACCMYHHCILVNQNNDPSDSVAVS

SEQ ID NO: 369093 - protein, 124 aa, Zea mays
  Clone ID: MRT4577_99789C.1.pep
ILKPPYPIKHNALISCGISTRDQKRDNLKELRALSKKNPRAAATPALKKNTQQKRHAEKADALRQGRGAQKHPKVFLEAKRLWRAGRRPDVPRGTKKRARLKKTGGRTKKQHIIHPEEGNKALT

SEQ ID NO: 369094 - protein, 198 aa, Zea mays
  Clone ID: MRT4577_9978C.1.pep
NSTAPGSCVEGNSPYLASVVNDPNKNSLAPLVQCTSHMCPIRVHWHVKVNYKEYWRVKITVTNFNYRMNYSQWNLVAQHPNFDNLTTIFSFNYKPLNPYGVINDTAMLWGIKYYNDLLMTAGPDGNVQSELLFRKEPSTFTFHKGWAFPRRVYFNGDNCVMPPPDAYPWLPNAASPRLSPSLLLPLVAAAWTAFAVLS

SEQ ID NO: 369095 - protein, 84 aa, Zea mays
  Clone ID: MRT4577_99790C.1.pep
PMPEVPVTSEYCVRWVAPPPAAAWLPPAGWDPAGTLGPPPPIVLKNPSMTLSAKVFKMEYGGVRRSMRELTTLGIKGPKNRPKP

SEQ ID NO: 369096 - protein, 55 aa, Zea mays
  unsure (1)..(55): unsure at all Xaa locations
  Clone ID: MRT4577_99791C.1.pep
SRINALFDHFKMALDCFFAVWFAAGNERIFGGRSSAXDAPNSYRXCIVFLTSSCI

SEQ ID NO: 369097 - protein, 65 aa, Zea mays
  Clone ID: MRT4577_99792C.1.pep
KKKKKKKKKKKNKKKPKKKRKKRKQKKKKKKKKGAVRHRFWFLLGRVNGPAWPKKGNNRGPLGKM

SEQ ID NO: 369098 - protein, 190 aa, Zea mays
  unsure (1)..(190): unsure at all Xaa locations
  Clone ID: MRT4577_99793C.1.pep
MTTTVLVACNINLPWHRPYLRLENNCEMAVLCKMTKAYCLVSIGGTYNFYSAXTVLLHHAMPVDKTSIAATRTIGRXVSGNNNGFLLPHTTTDQXLQHLRNRLTDQVEEKSIDERIFVLAKWIAWSDHDGLTHPVLDKETEELIANVLSSQXVTHTIAGNILVGRYWNFSNRXGLERXHTCADNLEELYT

SEQ ID NO: 369099 - protein, 59 aa, Zea mays
  Clone ID: MRT4577_99794C.1.pep
TVVNHVECWIQKPLVGPKMKARERSTSYLCRSFNTPCYLQLNISCVIGVRRAFIFLSIY

SEQ ID NO: 369100 - protein, 46 aa, Zea mays
  Clone ID: MRT4577_99795C.1.pep
TVQIRGWRTWNRLLRVGWVPCNDGIHTDQRGALGTNQGLGGAHQHD

SEQ ID NO: 369101 - protein, 291 aa, Zea mays
  Clone ID: MRT4577_99796C.1.pep
MLVKSGSVDAAAPNDTVVAVQESDENTDKPLKQTQPGKTEDDVHSTTSSTNTPRAAARKSAAAAAAGFSFRLEERAEKRKEFFQKLEEKIHAKELEKTNLQEKSKESQEAEIKLLRKSLTFKATPMPSFYKEQPPKVELKKIPPTRARSPRLGRHKAASSATAPAPADGSVSCGSPRSTANSGKVNEIMENIKPRVPARKSIQRPVTKTPLQVSATTKAEPRPIATKPKIANSKPKVSRAKVAQAQGNSAEVPPSEPSASEELVVEHGVGEATGPDLASQLVASNEVPVHG

SEQ ID NO: 369102 - protein, 83 aa, Zea mays
  Clone ID: MRT4577_99797C.1.pep
KTKWMSTPETINHDTSSDSTSNEAHTLAIHRTVASPMPCSTVKSSGAAGSEGGASAGVSCARATFALEALGFEFEIFGLVTTG

SEQ ID NO: 369103 - protein, 51 aa, Zea mays
  Clone ID: MRT4577_99798C.1.pep
IAQSAMVYRFWSRHPNFFFSLSLSMPCILLDIVFMFKIPNLVYLAFIKETS

SEQ ID NO: 369104 - protein, 275 aa, Zea mays
  Clone ID: MRT4577_99799C.1.pep
RNSRCPRAIHENTDKPLKQMQPGKTEDDVRSTTSSTNTPRAAARKSAAVAAGFSFRLEERAEKRKEFFQKLEEKIHAKELEKTNLQEKSKESQEAEIKLLRKSLTFKATPMPSFYKEQPPKVELKKIPPTRARSPKLGRHKPANSATAASADGSVSCESPRSTANSSKVNEAMENNKPHAPARKPVQRPVVKAPSQASATTKAEARPVVTRPKISNSKPKASRAKVARAQETPAEAPPSEPAAPEDFTVEHGVGDATGPDLTAQLVASNEVPVHG

SEQ ID NO: 369105 - protein, 283 aa, Zea mays
  unsure (1)..(283): unsure at all Xaa locations
  Clone ID: MRT4577_9979C.1.pep
MAPPPLLPARFVAASVALLAVAFSSSLTRPSGAYDPLDPNGNITIKWDVIQWTADGYVAVVSLYNYQQYRHIQAPPGWRLGWVWAKKEVIWAMTGGQATEQGDCSRFKASVLPHCCRGTREVVDLLPGTPYNTQTATAARGGVLASWAQDLSDAVASFQVSVXXQAGSTFNYRMNYSQWNLVAPGPGYTCGAAKLVKPTKFMSLDGRRSTQAXVRKINLKPTKFMXTIDLFNFFAXTWNVTCTYSQFLAQRSPTCCVSVSSTYNDTIVSXPACSYHCRQNNSR

SEQ ID NO: 369106 - protein, 242 aa, Zea mays
  Clone ID: MRT4577_997C.1.pep
MSTSSSPSSSTSTSAAADYHCRTKHSPTAGYARGPGRLDWANQPNPFLRFSPAPPLPLPNPPQLAPVPYPALFHSPPPPPQPLTLDSLSALLFHSLALSAWKSAGLSTWSLRVNPSSGNLHPTEAHLVFPHPREVDRLAIAHYAPRDHLLEARATAPIRDCSAILSAPGMAILALSSVFWREAWKYGERALRYCNHDVGHALAAVALAAATLGWDARLLDGLSDEDLGRLVGVEKGARLLLL

SEQ ID NO: 369107 - protein, 99 aa, Zea mays
  Clone ID: MRT4577_99800C.1.pep
VWGKAAYQRPPAQRPLKFHWAAPTRPETNLTQTNASPAHIAVTKYTVVHHNNLKHGNMHNPTGERETPVPIRPQVTRQRAVSSCSSCQGAPQRKGPGHQ

SEQ ID NO: 369108 - protein, 80 aa, Zea mays
  unsure (1)..(80): unsure at all Xaa locations
  Clone ID: MRT4577_99801C.1.pep
RLTQLKHTQPSFPTFLVSTLLPIPSFSSSPPLQLFNSMLWFLSKSNTCISTIKQFSVAKYLLQNNFFFFFFFFWYFFXWP

SEQ ID NO: 369109 - protein, 32 aa, Zea mays
  Clone ID: MRT4577_99802C.1.pep
LPRFFIKTLGQDTFFNKPSYLVDPLFEGLPNQ

SEQ ID NO: 369110 - protein, 63 aa, Zea mays
  Clone ID: MRT4577_99803C.1.pep
LVTYRAGPLFCFVDIFQNLFMPEKENLGLYGLPKETWEGTLPTEEVPSEVTKPGLGINFARKG

SEQ ID NO: 369111 - protein, 67 aa, Zea mays
  Clone ID: MRT4577_99804C.1.pep
ECSMVGVKVEYSASTPFRVVLCFFFRVFCFFFLNVLACFNPFFNLTLFHCGIILPNLAIEQINKSIV

SEQ ID NO: 369112 - protein, 35 aa, Zea mays
  Clone ID: MRT4577_99805C.1.pep
VKNRSYSRWRERTLSFLLGTDLTCGRRRSARTRST

SEQ ID NO: 369113 - protein, 60 aa, Zea mays
  Clone ID: MRT4577_99806C.1.pep
CLRVSLIATINATTTDTWTQSCVLSTYIITSHVRTLCYTYCYTYGHQWWNLDGIMNGVVN

SEQ ID NO: 369114 - protein, 58 aa, Zea mays
  Clone ID: MRT4577_99807C.1.pep
GNMNIFPLLDIFSVCLVGNFSGPFPVQSGQVWVKSLDLDKHFLVSCKLPQVGSLFILV

SEQ ID NO: 369115 - protein, 73 aa, Zea mays
  Clone ID: MRT4577_99808C.1.pep
VGPSRCCVISELGSIKWCYCWQWMLGPVSCARCPIPAAFAACCILCWLVPVLSVYVFSSKALLAWNWNGSSFG

SEQ ID NO: 369116 - protein, 86 aa, Zea mays
  unsure (1)..(86): unsure at all Xaa locations
  Clone ID: MRT4577_99809C.1.pep
RTEVQRAVLPLNGHEAIQKIIVLNPTILDTYPELYFHIHQLKLIXLILDGEINESLEFTQEELXAPKGVELQTFLEEIDNTVALLV

SEQ ID NO: 369117 - protein, 583 aa, Zea mays
  Clone ID: MRT4577_9980C.1.pep
MAVPPLLLVAVAVAALSILVLVVFAFRRCRRRRQRHPLQAAAVAPTPVAVQDEDIDRPLLSENQSDHSRQNISFLGSSVGEPSKIQTNRSNTSPRSHAIADTGRIYPAECCVTQGETHVINVENDTSEEFQLGSTLRRTPPPKWPTPDQKHRRRVSGDDNHNGSVPLKDNTYHSRLDLEVIAGPSHGISCSRQSSRPSMLPITLGRVPPSDLVLKDSEVSGKHAQINWNGKTLKWELVDMGSLNGTFLNSQAVHHPSAGSRHWGEPAELAHGDIITLGTSSKLSVQIILQNQRVPAGVGMASDPMVARRSGKKLPMEDISFCQCPLQGVEHFGLFGIFDGHGGDGAAKAVSKILPENLGYMLSHPETKERVQSCSDASDVLRYAFTLTEDTIDHQYEGCTGTALLIWFDQNKDCFAQCANLGDSACVMSVNGKTIDMTEDHRVTSATERARIARTGQPLRDGEARLSGLNLARMFGDKFLKEQDPRFSSEPYVSQAVRITKACTAFAVIASDGLWDVISTKRAVQLVVEGKERRSSGDATSAAARVASRVLDEARSLRTKDNTSVIFVDFDVLRRDPCISPVD

SEQ ID NO: 369118 - protein, 121 aa, Zea mays
  Clone ID: MRT4577_99810C.1.pep
KRRLKIKHVQEHHSSNTEDLSDFACLSPLPPLESSFSLSAIPSSARRSNQNLTILAARWGGPAGACFSEGGRGEAGRLWTGRRAQAVCDPRGGWASEEWTRGARGFIGEKWEDGRGRVPGR

SEQ ID NO: 369119 - protein, 106 aa, Zea mays
  unsure (1)..(106): unsure at all Xaa locations
  Clone ID: MRT4577_99811C.1.pep
XKXLIGVFFGVNIYTVKRVXGNQTLNQIVFFRFFTNLKKGIPWALECALLFNLKTFNLLKKKKGGLFFFSKGNKKKSRDICFFFPGKVFPPPPPQKFGFFCPGQNF

SEQ ID NO: 369120 - protein, 191 aa, Zea mays
  Clone ID: MRT4577_99812C.1.pep
PAGPGLAHPPRGSQTACARLPVHNLPASPLPPSLRKASSGPDRPTARAHTQRERERPHGRSGFLWPGARHEHGAARQEGIAERENEDSKGGRGERHAKSERSSVLLLCCSWTCLIFNLLLYIYIYIIFLRRWEERRWTKNSVMIMVVVQRRWLRAQNDEHMGLGWGVCIYLSHAAFVQDYYTTKKKKKKAP

SEQ ID NO: 369121 - protein, 163 aa, Zea mays
  Clone ID: MRT4577_99813C.1.pep
MAQRDKKEEPTELRAPEIALCANNCGFPGNPATQNLCQSCFSASRSSSSSSQPSPTSSPSASAPAAAVPQPRPALLDAALQLAPPAAAAGQPVEASARTSANRCSSCRKRVGLTGFRCRCGDLFCGAHRYSDRHGCRYDYRGAARDAIARENPVVRAAKIVRF

SEQ ID NO: 369122 - protein, 164 aa, Zea mays
  unsure (1)..(164): unsure at all Xaa locations
  Clone ID: MRT4577_99814C.1.pep
MAQRDKKEEPTELRAPEIALCANNCGFPGNPATQNLCQSCFSASRSSSSSSSQPSPTSSPXLPRRPPRXQPRPALLGAALQLAPPAAAAAGQPVEASARTSANRCSSCRKRVGLTGFRCRCGDLFCGAHRYSDRHGCRYDYRGAARDAIARENPVVRAAKIVRF

SEQ ID NO: 369123 - protein, 56 aa, Zea mays
  Clone ID: MRT4577_99815C.1.pep
QEKKWEPQTQTDKKGPDYQYTKSHTKPKRQDTEPRWKLSGKNAAKGRAGYHMTPGG

SEQ ID NO: 369124 - protein, 27 aa, Zea mays
  Clone ID: MRT4577_99816C.1.pep
KKRKQGLPHYTNRGPISLVCFLNDYLT

SEQ ID NO: 369125 - protein, 77 aa, Zea mays
  Clone ID: MRT4577_99817C.1.pep
SERVPRQSVTEPPKSLGPPTVVLVQRTSDNPVNAHNHLTSSISVSFTFPKSVSPVTQILQHIGGTNKRKQITITYLT

SEQ ID NO: 369126 - protein, 93 aa, Zea mays
  Clone ID: MRT4577_99818C.1.pep
SLEQAYSDRKQGIREQLDSGRHLAELVRWSEYHSLGPEFDSPCEANFRLWLKNSSHLSHAKGRSHMAYDAARVFKRATGPILCTASLFQAPKS

SEQ ID NO: 369127 - protein, 120 aa, Zea mays
  unsure (1)..(120): unsure at all Xaa locations
  Clone ID: MRT4577_99819C.1.pep
MMEILHIQGAQXCANQIAAELWVGVXNEHGVDPTGRYAANSHLQSERVTVYYHEGSCARFGHPAALRPLEAATMHRVRTGLYGQIFRPDHCXLGDSGAANKGALGHNTYGVELPNSAPHA

SEQ ID NO: 369128 - protein, 43 aa, Zea mays
  Clone ID: MRT4577_9981C.1.pep
IASFLPFFFFLSVKHPLVDQIPGRYTSLHKTTNIKLFTVICTT

SEQ ID NO: 369129 - protein, 453 aa, Zea mays
  Clone ID: MRT4577_99820C.1.pep
MASPAAASPARRLSVIFSSTKPRARPPKPAPAPKAPAGQAVAKPDERCESRNLTKILQVIFRERDPDKLVSQFIAESTASERFRNKHRVYDVAVARLASFGRHDGIAAIIDSQKPFIAASSVGFAARLIRLCGRASMPSHAAAIFHDLPPKHKSSMTFNALLAAYLDASDFDALATALQEIPATHPTIAPTIYSHNILISALCKKPDLSAAVDVITLMEKRGITPDIISFNILLNGFYSNDRFDDVEKVWEMMKERNVEPDARSYNAKLRGLVSQGRVEDAAALIERMQKEGPKPDSVSYNELIRGYCNEGRLNEAKKVYDNMIKNGYAPNRGTFHTLVPHFVEAGELDHALSCCHEIFTRKCRVQCSLLQGVVTALFAASRVEEAKRIVHLGRENYYPRKGLRMPPRTRKDEGLKMPQPGGEGNDVEAGTDSEDSVSYEDGCEQEEESKNGQ

SEQ ID NO: 369130 - protein, 117 aa, Zea mays
  Clone ID: MRT4577_99821C.1.pep
TEKTIVTILIEEASKEPSCGVEQDGQGYSCDEEAVKKPVCMDSHDAQGSDISAATIASVGDGSNGLSMSQPNATEPTGCPLTNGVIDKDISSPLDEIRSEKTDDILAKPSYKPIVVD

SEQ ID NO: 369131 - protein, 75 aa, Zea mays
  Clone ID: MRT4577_99822C.1.pep
MASGGVVASLLSSATKLLDLLRGAPSVSRRAGQQQPVSADVHRLQRLLRRIQATIDDAGEREIRDSSVKLWIAEI

SEQ ID NO: 369132 - protein, 35 aa, Zea mays
  Clone ID: MRT4577_99823C.1.pep
TSSCTLKSSYIQGKIRAFIFAFILHLTFYNTTIVY

SEQ ID NO: 369133 - protein, 79 aa, Zea mays
  Clone ID: MRT4577_99824C.1.pep
ATQRACFEKRNLSKGPCFPESEKKTTPGTYDTRPNQAKLGAAMPFNRGDGGSLDEPDGPGLRVDRKHALDDDDLAIFRQ

SEQ ID NO: 369134 - protein, 120 aa, Zea mays
  Clone ID: MRT4577_99825C.1.pep
FGTRRRSTSSDAPPSPAVTSTRRTLFPAPPSKVRATRTYPCLRWHLSRNQGGNHPCIGVLILAQTSALLNTDSRHPPQSAPNAFFTFPGLCCAIADRIQDPCGPMRAVVCSDGCSKKKEW

SEQ ID NO: 369135 - protein, 113 aa, Zea mays
  Clone ID: MRT4577_99826C.1.pep
MDREADHSDLLLAGSCGHHIIYITRYYKGLKKTTTVHIIYYGTKPVHEMDLDTKLNYHLHLRLCGNLKCTLSHIMRPHKCARLFRELQDVVVEVLLEHVHNDARMWRNDHSYK

SEQ ID NO: 369136 - protein, 268 aa, Zea mays
  Clone ID: MRT4577_99827C.1.pep
MLLASSTRRYEQFPLARNNGLPRFSRVKMSCLGTNQSNHHSDTVRSSSPSCGDTRKIHPVVKMCGITSARDAEMAVKAGAELIGMILWPNSKRSVSLLEAKEISRVAQSYGAESVGVFVDDNEERILRVSDSCDLNFVQLHGDESRALVHTLSKNNRIIYVLNADDDGKLINIPDIEYELDWYLVDSAKGGSGKGFNWQKFQMPSVKSKNGWLLAGGLHADNVCEAFSALKPDGVDVSSGICGRDGIRKDADRINSFISNVKSLNLHR

SEQ ID NO: 369137 - protein, 106 aa, Zea mays
  unsure (1)..(106): unsure at all Xaa locations
  Clone ID: MRT4577_99828C.1.pep
RGKRQSKKEECQGQEQXQNTRRSYXNYSSSSNIKNCYEFVREQWGLLVTPFLQSGLIQASRCQVLKQQCCYDLRKIEPGYIXEPHPTLVLFIIKEEXGRTPIELCG

SEQ ID NO: 369138 - protein, 339 aa, Zea mays
  Clone ID: MRT4577_99829C.1.pep
GSVPRVRDDERTDTVLLKFLRAREFKVKEAMAMLKSAVLWRKRFGITSLLDADLGLPELENVVFYRGADREGHPVCYNVYGEFQDKDLYEKAFGDDEKRERFLKWRIQLLERGILSKLDFSPNGICSMVQVTDLKNSPPMLGKHRAVTRQAVTLLQDNYPEFIAKKVFINVPWWYLAANKMMSPFFTQRTKSKFVFASPAKSAETLFRYIAPEQVPVQFGGLFKEDDPEFTTSDTVTELTIKPSSKETIEIPVTENSTIVWELRVLGWEVSYGAEFTPDTEGGYTVIIQKTRKVPANEEPIMKGSFKVGEPGKLVLTVNNPASKKKKLLYRSKVKSTSE

SEQ ID NO: 369139 - protein, 88 aa, Zea mays
  unsure (1)..(88): unsure at all Xaa locations
  Clone ID: MRT4577_9982C.1.pep
FTILQASXYFETSFSISDGIYGSTFFIATGFXHGXXHVIIGXSTFLIVCLLRQLKFHFTSKXHFGFEAAAXLXHFVDVVXLFLYVSIY

SEQ ID NO: 369140 - protein, 71 aa, Zea mays
  Clone ID: MRT4577_99830C.1.pep
WVQLAVRVLFSEYSLRFRFELLSQSFCSQWTFILRHEVVMVGCSCLGPVDQSLRCFHSPNYGDGGRHAQES

SEQ ID NO: 369141 - protein, 88 aa, Zea mays
  Clone ID: MRT4577_99831C.1.pep
VPDVQDQHGVGALQSCCWQEKKSSTGEVVRAVSSCCVTSFTDVQVDGGFSARSTRLPSANSRGEKNFCVGFKQNCTVKNQAIRAKSIP

SEQ ID NO: 369142 - protein, 84 aa, Zea mays
  Clone ID: MRT4577_99832C.1.pep
FLTATQPLQREALTAARGGTQEPLSVEGTMRGHNGEETAIATPIDSTANIEYNFRHRFLTHVRPSQPGPLHPGIRRHRRLLRPL

SEQ ID NO: 369143 - protein, 53 aa, Zea mays
  Clone ID: MRT4577_99833C.1.pep
MKGVWVCINRLLLLKGPTGLGPGYGVPRKKGGGLYPCLPVDIIPIRPMPGFVN

SEQ ID NO: 369144 - protein, 58 aa, Zea mays
  Clone ID: MRT4577_99834C.1.pep
KPSRYLLFLVYIKERCVLWCRESLSPSRIMLAGQRARMDRRRRHQSSLVLILISNFYF

SEQ ID NO: 369145 - protein, 92 aa, Zea mays
  Clone ID: MRT4577_99836C.1.pep
GETYLYWLRRRPALYVSDPELIREIGRCVSLDMGKPTYLQKGQEPLFGRGVLKANGADWHRQRKLIAPEFYMAKVKGMVELMVDAPQPLLKA

SEQ ID NO: 369146 - protein, 282 aa, Zea mays
  Clone ID: MRT4577_99837C.1.pep
VRPASALLQGWRGDPVVIGEWWDMDLAQLDRNTMDGFLVDVPTGSTINGKLGDLYSCSGAGRDGFVLEVEPGKTYLLRLMNAALFSEYYLKVAGHRMTVVASDANYVRPYTTDVVAIAPGETMDVLLPADAPPGRSYYMAALAIQAPEPDVQVPPTITRGIVQYRSSSSDVAVDGVVVPAADPAVVMPDMPDQHDTTISFHFHGNLSSLRRRHRVPPARADDHMLVTLSLGSVCRDGGRACARSDSDESIIVGTMNDVSFRAPTAAAMPLLEAHYYGRGDMA

SEQ ID NO: 369147 - protein, 75 aa, Zea mays
  Clone ID: MRT4577_99838C.1.pep
SVFHSRTILRGPPPTSWGGHIRRKPYSSPWAGIDRLVTITKTQGGPVTMLWSWKYVLQIFCFKGPQLRDAYISNF

SEQ ID NO: 369148 - protein, 76 aa, Zea mays
  Clone ID: MRT4577_99839C.1.pep
MGTGGNRATNTTGPAQEHEANGNGNGEQKTRHFEVGHKSLVKSDDLYQYILDTNGYPREPESMNELGENTGEHTWN

SEQ ID NO: 369149 - protein, 39 aa, Zea mays
  Clone ID: MRT4577_9983C.1.pep
VVSLFPVSTLAKCPPTVIFPCAPLFGHPSRYNCVISNVL

SEQ ID NO: 369150 - protein, 72 aa, Zea mays
  Clone ID: MRT4577_99840C.1.pep
STGELMASSSSSSHRRLIRAAAVLLSVLAAASASAGTFCVPGWAILHYLFPSCLFFPYASCLFRILFLLTEF

SEQ ID NO: 369151 - protein, 220 aa, Zea mays
  unsure (1)..(220): unsure at all Xaa locations
  Clone ID: MRT4577_99842C.1.pep
MPWNRFMPFLSKCCTSTVQTSSSYSSFSSSFSPIQPWLFVGLGNPGEKYQSTRHNVGFDMIDAFAQSQGIPLTTHYFKALFGEGMVDGVPVLLAKPQTYMNLSGESVGPLAAYYKLPLNRVLVAFDDMDLPCGVLRLQPKGGSGRHNXGIGRPAGQMDPKAFVLQKFNRTGRERIDSAVREGVDILKMVAARGLTEAAKLTNADQKYKHLRSHGIQTNDD

SEQ ID NO: 369152 - protein, 249 aa, Zea mays
  unsure (1)..(249): unsure at all Xaa locations
  Clone ID: MRT4577_99843C.1.pep
MPWNRFMPFFSKCCTSTVQTSSSYSSFSSSFSPIQPWLFVGLGNPGEKYQSTRHNVGFDMIDAFAQSQGIPLTTHYFKALFGEGMVDGVPVLLAKPQTYMNLSGESVGPLAAYYKLPLNRVLVAFDDMDLPCGVLRLQPKGGSGRHNGLKSVIYHFRKNREFCRLRIGIGRPPGQMDPKAFVLQKFNRTGRERIDSAVREGVDILKMVAARGLTEAARLTNXDQKHKHLRSHGIQTKHLRSHGIQPNDD

SEQ ID NO: 369153 - protein, 56 aa, Zea mays
  Clone ID: MRT4577_99844C.1.pep
MVFLDFLSQGIILGNYRQKYFPQRKKIRCVFGVESIKGLFNKFGPFFFFSPSLNLL

SEQ ID NO: 369154 - protein, 79 aa, Zea mays
  unsure (1)..(79): unsure at all Xaa locations
  Clone ID: MRT4577_99845C.1.pep
MAXXASAPAFTGPRFAPADPTLSKPWRGLIHGNTGYLYLWNPETKVSQFERPVASVPAPQSQPVVYFRPHDWPISHAPG

SEQ ID NO: 369155 - protein, 85 aa, Zea mays
  unsure (1)..(85): unsure at all Xaa locations
  Clone ID: MRT4577_99846C.1.pep
MHPGGKGHCQGHSHCGPPPAHGPGHCPGGNHPPGPGGPSHSHSPGHCPGGNHPPGPGGPSHGHGPGHCPGGQHHPPGTDRPXHGH

SEQ ID NO: 369156 - protein, 66 aa, Zea mays
  unsure (1)..(66): unsure at all Xaa locations
  Clone ID: MRT4577_99847C.1.pep
LFWRYHRPRGLASRREYCYLGHVGHGSTFHVYHYSYSVCGFXHGTGGMRHGTGTTGGMGQLGEHGC

SEQ ID NO: 369157 - protein, 86 aa, Zea mays
  Clone ID: MRT4577_99848C.1.pep
YIRTEKNKIQSRNTIKNVFLHILKKKSSYIYALYDDLIYELILQNFQKQIISIPKIPLFRFVAFLNCLPMKLMLSEVFYLLECNPC

SEQ ID NO: 369158 - protein, 80 aa, Zea mays
  Clone ID: MRT4577_99849C.1.pep
GFWFLCSRTSARYSRRVKPDLVLPLIGDLPIVQLASHRPEGASWSPGEMLELVQSPSLRQLLDSFTHVLRTVHKDVAQLG

SEQ ID NO: 369159 - protein, 300 aa, Zea mays
  Clone ID: MRT4577_9984C.1.pep
PRGRLEEAFELLKKLKDSPLTPDIYTFTIVLDGFCKVGRTEEATAIFHDAIGMGLSPTTFTYNALLNGHCKEGNPLKAFALLMEMCGNNDAACLPDKTSFGIVLTALLRAGETSAAWQTYKRMERAGFEVDGRALDTLARGLCRRCATDASALGDAEEVFGKVVASGHEPVSYTYCLMAQALARGGEVDAAVALLEDMVRKGYALRKRAYTDVVRALCDRGRARDALQVLVLVMIVRDFVPGRNAFEALLGELSRQGRWADAMTVYAAAVKRGVVVSWKHLGREAHSPEEPIRLGVPVPQ

SEQ ID NO: 369160 - protein, 177 aa, Zea mays
  unsure (1)..(177): unsure at all Xaa locations
  Clone ID: MRT4577_99850C.1.pep
GVKLKIRPKKKAKKGKEKGERRRKRKKRKGKEPKDRARGRYKVKXEQTRNKGKKSEKRGEKGGDKENTQSXKKWKRVKPKWNFCRNKGNMQKGGXKKKGQTKGKKSGXKKKKRTPKRRKEKPKKNQEKGEKKANKKTCIKQGKNFYLNFFNIFFIFFFFFFFFFFFFFFFFFFFFFL

SEQ ID NO: 369161 - protein, 104 aa, Zea mays
  Clone ID: MRT4577_99851C.1.pep
VFPEITLGGVELSQPVKSLVPESFLIVVEFLSVIPGMRGAHFSGEIGFFCVGKSLRLRLYGLKEGTDLSAGFVHLMYQGMLKVTFHIMVLKKKKKKKKKRAAAD

SEQ ID NO: 369162 - protein, 110 aa, Zea mays
  unsure (1)..(110): unsure at all Xaa locations
  Clone ID: MRT4577_99852C.1.pep
HTPRDVSLFTTLSLCGLGDTTLPMCTRRKLAEYPGLHAYTRDIYQLPKVVETCDMDAIMAGYYKTLXRLNPGGIQPHPPATCDRETVLRPHGREALTCADGTPIEASAAS

SEQ ID NO: 369163 - protein, 65 aa, Zea mays
  Clone ID: MRT4577_99853C.1.pep
TYRISGYGQLMAECLVSIRFFFHIRHHSFWINRAFNITYLSSRQLGSWYTLNMRKSVQVVSVLFE

SEQ ID NO: 369164 - protein, 104 aa, Zea mays
  unsure (1)..(104): unsure at all Xaa locations
  Clone ID: MRT4577_99854C.1.pep
SVCTYRYGLPFVSPNNILVSTINGTGSVIEAIYVVIFLIFAVDRRARLSMLDIXGIVASIFTTVVLVSLLALHGNARKVFCGLAATIFSICMYASPLSIMVRER

SEQ ID NO: 369165 - protein, 150 aa, Zea mays
  Clone ID: MRT4577_99855C.1.pep
QEVLVLQGDQELHVRSDVMDKFNSDRRGKRKVLIASTTACAEGISLTGASRLVMLDSEWNHSKTRQAIARAFRPGQERMVFVYLLVASGTWEEDKYNSNRRKAWIAKMVFFGRHFDDPLQNRVTEIDDEVLKELADEDETNTFHMIVKQD

SEQ ID NO: 369166 - protein, 104 aa, Zea mays
  unsure (1)..(104): unsure at all Xaa locations
  Clone ID: MRT4577_99856C.1.pep
YGRENMVRIAGGMKVKYDRGKSSPYATMGSDQEVAQSNKELGITALHIELSSAEGNKNKTPGIGAQSALRAIDRCRMRTGRIXEVTAVPKPSNHIKVSSSESRL

SEQ ID NO: 369167 - protein, 112 aa, Zea mays
  Clone ID: MRT4577_99857C.1.pep
MKEAMAVAALDEIWWREPEEEAPVEWTWSWGAGTDGQLGNGGFDDHHLPQPLLLPTPCRSRVSFVAGGGAHAIALTSDGEVFTWGRGTHGQLGHGNLDNMPHPKLVKFLEII

SEQ ID NO: 369168 - protein, 80 aa, Zea mays
  Clone ID: MRT4577_99858C.1.pep
QTMATTGGVEEVHVTAGTYRPVQRMQRPLSGNIYECVCHKHSVTCSLVMVYSYQGIRFNFQMLLLLPFKFNILFSAPEKK

SEQ ID NO: 369169 - protein, 57 aa, Zea mays
  Clone ID: MRT4577_99859C.1.pep
YTFALIIMYGFRTSVCMRRVLTLRPDPTHDARPRQPQEEARRSRRTIPIPLAIHSLP

SEQ ID NO: 369170 - protein, 269 aa, Zea mays
  unsure (1)..(269): unsure at all Xaa locations
  Clone ID: MRT4577_9985C.1.pep
LSSDASTPFHLTIPSTDSLERVEARRPRSLAKIFGTAVCVSGAMAMAFFKGPKLLGDGPNALQLLLHAGGGRWVAGALFLVGSSSCWSLWLILQVPICKSYVEPLALSAWMCVLSTLQSALLVSFLLPDPXXAWRIHSLFELSCCVFSGVFGSGVTFYLQSWSISVRGPLYSAMFNPLCTVITTVFAAAVLREELHVGSLLGAIAVIAGLYVVLWGKAGDAKRRGLQDQEPEQHSDDDLEKTSARSDSMVDVGNGIAEPLLAGGDPTAK

SEQ ID NO: 369171 - protein, 44 aa, Zea mays
  Clone ID: MRT4577_99860C.1.pep
QVIPKQPGLQKCRNLHLLYHYLNHFNLFNAGYRSSAMSIIEHYL

SEQ ID NO: 369172 - protein, 109 aa, Zea mays
  Clone ID: MRT4577_99861C.1.pep
YAGCGQPSAMFQPLRQQCCQQQIRMMDVQSVAQQLQMIMQLEGAAAASSSLYEPALMQQHQQLWAAQGLNPMPIMMAQNIPAMGGLYQYQLPSYRTNPCGVSAAIPPYY

SEQ ID NO: 369173 - protein, 501 aa, Zea mays
  Clone ID: MRT4577_99862C.1.pep
MIEQFVNFVIRPPRAEYNPDQYLWEPEFTLAGRKYKRLDLELTNERSQTLKCSHYVPAVIPENTSLPCVVYCHGNSGCRADANEAAVILLPSNITLFTLDFAGSGLSSGDYVSLGWHEKQDLKCVVSFLRKNKQVSCIGLWGRSMGAVTSLLYGAEDPSIAGMVLDSAFANLYDLMMELVEVYKIRVPKFTVKMAVQYMRCVIQRRAKFDIMDLNVVQFAPKTFIPALFGHASNDMFIQPHHTDHIHQAYAGDKNLIKFEGDHNSPRPQFYYDSVSIFFYNVLHPPQFPSTCTHKLDKYYNLGAFKGAAGTNESLLYEIINGLRAAGTDAGSSSAATASFTNATKSVVELLTERVNQLSVKNDNDLDFLLDENHNLTEMDGNTGECHLEDKSNRQTDECCSYTSSNRESWGRCSSLGGASDGLSSGEQPEIPNHKLKSLTLRALATPLRRVRRKPLAIPKEKNRSLWKRLKKERQQMGENISQRLRLCLQGQARHKRTKSS

SEQ ID NO: 369174 - protein, 121 aa, Zea mays
  Clone ID: MRT4577_99863C.1.pep
LFEMDPDYTVLAFADMMRKKITMPAHLMYDGKDDNLFEHFSAVAQRLGVYTAKDYADILEFLVQRWKVAELTGLSGEGRRAQDFVCTLAPRIRRLDDRAQARAKQAPVIPFSWVYDRKVQL

SEQ ID NO: 369175 - protein, 102 aa, Zea mays
  Clone ID: MRT4577_99864C.1.pep
APPGFPFLLPACIFCGIFKGKQFSPGKNFSHFFPKFGAKLGSPKNGPQGVGIRPQGPPRGGEKKKKKKKKKKKKKKKKKKKKKKKKNRKKRKKKKKKKKKSL

SEQ ID NO: 369176 - protein, 135 aa, Zea mays
  unsure (1)..(135): unsure at all Xaa locations
  Clone ID: MRT4577_99865C.1.pep
RSQTLKCSHYVPAVIPENTSLPCVVYCHGNSGCRADANEAAVILLPSNITLFTLDFAGSGLGRGDYVSLGWXRCVHTINFVATFIFYFKWQVLKNXPLWYSQKQDLKCAVSFLRKNKQVSCIGLWGRSMGAVTRY

SEQ ID NO: 369177 - protein, 165 aa, Zea mays
  unsure (1)..(165): unsure at all Xaa locations
  Clone ID: MRT4577_99866C.1.pep
SSGNNAEYFFFFFFFFFFFFFFFFFFFFWEFGTGPGQEQGREPAPKQLRERAWKAPPKGGPGNPSKGGPPAPRWLFLPGLKGIFQSVGSATDRGPWVATEPGPLGGAPPPPXLGGGPPPRFPAGVGGQHPPXRGPGPPLSPPPAPXVPPPGAGASLPPPARAPPP

SEQ ID NO: 369178 - protein, 58 aa, Zea mays
  unsure (1)..(58): unsure at all Xaa locations
  Clone ID: MRT4577_99867C.1.pep
EIYQKKKMYPGGLHTIXARTRGLNPCQDRSDCEQEVIKDSTPSPDAFFYAAGNTPMPP

SEQ ID NO: 369179 - protein, 129 aa, Zea mays
  Clone ID: MRT4577_99868C.1.pep
NHNLTEMDGNTGECHLEDKANRQTEECCSYTSSNRESWGRCSSLGGASDGLSTGEQPEIPNHKLKSLTLRALATPLRRVRRKPLAIPKEKNRSLWKRLKKERQQMGENISQRLRLCLQGQARHKRTKSS

SEQ ID NO: 369180 - protein, 87 aa, Zea mays
  unsure (1)..(87): unsure at all Xaa locations
  Clone ID: MRT4577_99869C.1.pep
LHVVLHGEPLLLIGARPHLPCRALARLAFPLPIFNASRSSPSPPQVDGLTFLGAQALLGTHPSPXHPLAGRSHRYSYRSSSSSSHTR

SEQ ID NO: 369181 - protein, 49 aa, Zea mays
  Clone ID: MRT4577_9986C.1.pep
MAPIEKEPPTQVPGDLLLNTDLRQYKDHGNWIEILRVDNLVITGKGNLD

SEQ ID NO: 369182 - protein, 52 aa, Zea mays
  Clone ID: MRT4577_99870C.1.pep
GGTFKSQGGFQTNTKRANPESRLSTQKKKTIAPLKIRNQWPRSLMILTKKTC

SEQ ID NO: 369183 - protein, 69 aa, Zea mays
  Clone ID: MRT4577_99871C.1.pep
HITDVFSTMFTTILCMVSIMLLEPSLQQSTFFLRVYICPNLLVQKKHEKMLKNRYYAGKGLCGRTHVQL

SEQ ID NO: 369184 - protein, 83 aa, Zea mays
  Clone ID: MRT4577_99872C.1.pep
EPQPFGGDLMCMQHVTVPLQSTVAFQQRVSSAVCSKPSCSIGKSVFWCSQILHTFLKAVDAANNNCFRMAYVSRSHDYCRQQR

SEQ ID NO: 369185 - protein, 145 aa, Zea mays
  Clone ID: MRT4577_99873C.1.pep
PKIMSSLVFHQVNGSDDQDLLVDGAGIKPGDQFQVYLPDLKVAEAALNDVFAQLRNLKFKPNKPEVVGGFAFVGSCRGDSFFGCPNADSSPFLENFPELPFGGIFCDGEIGRSLILEEGEEKKEVSIQRFLHVYSSVYLIVSYTS

SEQ ID NO: 369186 - protein, 95 aa, Zea mays
  Clone ID: MRT4577_99874C.1.pep
KPGENITTVYHLIRPRGRPTKINLKKHKAVFPQLKPRQIPPPKKAYPQLANWPPAVEVPKKDPNPKPPRVLGIYKKLKKLAHPLKGTTRYLRRWI

SEQ ID NO: 369187 - protein, 79 aa, Zea mays
  Clone ID: MRT4577_99875C.1.pep
ERVGPSSRWPYGSALFHVHGLSHPFWEGEISFIVAFVPLGPNSYYPFNQKKKRAAAVRYTGSRRSCTRAYSVIDCVTVS

SEQ ID NO: 369188 - protein, 100 aa, Zea mays
  Clone ID: MRT4577_99876C.1.pep
LEAGRDSVQTRTPRIPSLPSYIEVTCMSLWTSSRLTSLPLSRAGAYTELPEHPSAIYGASLLAMSPLLIHPPVCRAPLSFTEKIQIARTLHTTSNQSWRG

SEQ ID NO: 369189 - protein, 60 aa, Zea mays
  unsure (1)..(60): unsure at all Xaa locations
  Clone ID: MRT4577_99877C.1.pep
STAPLGRNKPSHRVGPRAQKGMQNFFVTHRRHELSFQQMQLEKHTRGLXHIEWGFLAREY

SEQ ID NO: 369190 - protein, 192 aa, Zea mays
  Clone ID: MRT4577_99878C.1.pep
RRANREHPNMREVESAQDLADSLLSAGDKLVVVDFFSPGCGGCRALHPKIAQFAEKNPGVQFLQVNYETHKSMCYSLRVHVLPFFRFYRGAEGRVSSFSCTNATINKFKDALAKHGAERCSLGPARGLDESELMALAENRDLHFTYDKPGGLVPLAEAIAKEAAAPGGPWLPLPASLLGQGSADNSLLPSGR

SEQ ID NO: 369191 - protein, 272 aa, Zea mays
  unsure (1)..(272): unsure at all Xaa locations
  Clone ID: MRT4577_99879C.1.pep
MADTLCNGAVVSPCGRDVAGRARGAARAALAESLQVAGHASKTSFSAGRMSVKDSKPRPLSRSLEAAAPGQMNLSFPKAMRWWEKGLHPNMREVESAQDLADSLLSAGDRLVVVDFFSPGCGGCRALHPKIAQFAEKNPGVQFLQVNYETHKSMCXALRVHVLPFFRFYRGAEGRVSSFSCTNATINKFKDALAKHGAERCSLGPARGLDESELMALAENRDLHFTYDKPGGLVPLAEAIAKEAAAPGGPWLPLPASLLGQGSDNSLLPSGR

SEQ ID NO: 369192 - protein, 373 aa, Zea mays
  Clone ID: MRT4577_9987C.1.pep
MLEEYKPCAAMVVTQCIYAALALLSKAAFTGGMSPLVFVVYRQAVATIVLVPVVIAANRKKMKEMTTGLGLTGFSLVFVASLVGATVNQCMYYQGVNLGSSSMATAMTNLIPAITFVMAASVGLERVEARRPRSLAKIFGTAVCVSGAMAMAFFKGPKLLGGDGPNALQLLLHAGGGRWVAGALFLVGSSSCWSLWLILQVPICKSYVEPLALSAWMCVLSTLQSALLVSFLLPDPSAWRIHSLFELSCCVFSGVFGSGVTFYLQSWCISVRGPLYSAMFNPLCTVITTVFAAAVLREELHVGSLLGAIAVIAGLYVVLWGKAGDANKGGVEPEHHSDDLEKTSSARSDHNSTADVGSGIAEPLLAGGDPTEK

SEQ ID NO: 369193 - protein, 535 aa, Zea mays
  Clone ID: MRT4577_99880C.1.pep
WNTASAVGVTAAAGLVLVAIVVSSRRGGLKSPWWRRRRKAPLTAQEWCDLFTPQGKLQDGGVKLLKKVRSGGIEPSIRAQVWPFLLGVYSLDSSEAQRDVVKAQNRKGYLLLRKHCLRKLAYIMEESKQSTKTVKVNHEGSNSSEKGDESGCVSPFESEDVLENSGMGEATTEEGIPCLSTEQEVQDDTSETKPEQMNGNQSSSSSSDEEGSERSVVTQVEASHKNLASVCESSFEDGQESIPRYSNTGGNMDDVVLSKAARPVKSARATEDFETWQRIIRLDAVRANDEWISYSPSQAAVSKERAIESAKAVFLKDYDHLEPYRIHHASRLVAILEAYAIYDQEIGYCQGMSDLLAPLLAVLEDDDEAFWCFAGFMRKARHNFRLDEVGIRRQLNMVARIIKYKDFHLYRHLEMLQAEDCFFVYRMVVVMFRRELTFEQTLCLWEVMWADQAANRAEIANSSWRKLQLGAPPTDDLLLYAIAASVLQKRKLIIESYNSMDEIIRECNSMAGQLDIWKLLDDAHDLVVTLHDRIE

SEQ ID NO: 369194 - protein, 279 aa, Zea mays
  Clone ID: MRT4577_99881C.1.pep
MDMCAPRRLLLFSLPTPKLSPEHPLFRQRRRGRTWPGIARCATEVGTGWGGIVEDDLSELLQILPRDLRDNLQNEPRKDQLLEVILDLGRRPEARFLGDSGGQYLRDSEISQKELEDAQKAVGEFGGDNRAGIEGTLHRISAIRSRKGMVVGLTCRVGRAVTGHVDMVRDLLNYKESILFLGRPGVGKTTVMREIARVLADEFQKRVVIVDTSNEIGGDGDVPHAAIGGARRMQVPEPSMQHRVMIEAVENHMPEVVIVDEIGTEAEAQACRSIAERGV

SEQ ID NO: 369195 - protein, 94 aa, Zea mays
  unsure (1)..(94): unsure at all Xaa locations
  Clone ID: MRT4577_99882C.1.pep
GIFIAGTNHSAXKVNXSIFVGRIYRLFVXKYPKXYRKRCSKCKVHICQCFCVKXRSXVIMGHGRPVSKCVRFXNVVKVFPIGSYXAGKKAFFRS

SEQ ID NO: 369196 - protein, 60 aa, Zea mays
  Clone ID: MRT4577_99883C.1.pep
YYLFQNQIFLKHFTRYPTCNILHQLLRRSKRSSIFFYFLISTYLSGIFFLEQPTIYILLC

SEQ ID NO: 369197 - protein, 58 aa, Zea mays
  Clone ID: MRT4577_99884C.1.pep
VSNAMIMGMPDWAEQATLYSTQLPRPPMALMRWPYAHSRATAASVTSTNRLMTTMQFN

SEQ ID NO: 369198 - protein, 54 aa, Zea mays
  Clone ID: MRT4577_99885C.1.pep
KKPNQSRMPYSSQILLNDAQPRVAFSRTHALMLEDYIILVTDPEILIAMVPSGI

SEQ ID NO: 369199 - protein, 76 aa, Zea mays
  unsure (1)..(76): unsure at all Xaa locations
  Clone ID: MRT4577_99886C.1.pep
XSXHGTRXRNXLGSFLRSVPAXFXFFFGLNNTNXLQIARDFTKARSLTEQNQRRRWDGRTWDVTRRARPREFNGPS

SEQ ID NO: 369200 - protein, 79 aa, Zea mays
  Clone ID: MRT4577_99887C.1.pep
MASVSELACIYSALILHDDEVTVTEDKINALIKAAGVNVEPFWPGLYAKALANVNIGSLICNVRAGSPAPAAGAAPAGG

SEQ ID NO: 369201 - protein, 84 aa, Zea mays
  Clone ID: MRT4577_99888C.1.pep
HRWIVDMLTKQAASSSARSLRASPRARLCPDPSRRKEAQSLRLQRRGDECAGQPLLEGCASCPTTWTPCSPRRSSTSHSTPSWS

SEQ ID NO: 369202 - protein, 44 aa, Zea mays
  Clone ID: MRT4577_99889C.1.pep
SHEQLVFAVCVRPDSERVHTSFILSLLIIKFHLTSYPSRTRGRP

SEQ ID NO: 369203 - protein, 186 aa, Zea mays
  unsure (1)..(186): unsure at all Xaa locations
  Clone ID: MRT4577_9988C.1.pep
MAVSMREVDPVFQGAGQKDGLEIWRIEKLQAVPVPKESYGKFFTGDSYIVLKTTALKNGSFRHDIHYWLGKDTSQDEAGTAAIKTVELDAALGGRAVQYREIQGNETEKFLSYFKPCIIPEEGGVASGFRHTEVNEREHKTRLFVCRGKHTVHVKEVPXARASLNHDDIFILDTKSKXFQFNGSKS

SEQ ID NO: 369204 - protein, 112 aa, Zea mays
  Clone ID: MRT4577_99890C.1.pep
VHLLLFLSSPVGVGNAPLYQQQQLLKEIVPALIKVAVPNPFAHQKQLFPFKQVAGSNLVGDQQQRVQFLYPLAEAKPLVFPFQQQQKQLLPHIPFFFINLALHQPIGGGSFF

SEQ ID NO: 369205 - protein, 47 aa, Zea mays
  Clone ID: MRT4577_99891C.1.pep
DPLSKDLAFCTQLAPLQGQGSSYFFFFFFFFSNLVKLNSCLDSSNHP

SEQ ID NO: 369206 - protein, 155 aa, Zea mays
  Clone ID: MRT4577_99892C.1.pep
RRWTARARCRCLVGRTWAGIRASDCALGVVTTGRSGALADRCVSVWHVAVIVQSLRDEQHVRPHFWRQQQVVHPEGIRLGIILGRVRTVRARRSRGCRQGLGPAVCARGLGVGVARRHTHLWISQVRQCKCHLLLLALADAGAGGLRLLGPSGRG

SEQ ID NO: 369207 - protein, 75 aa, Zea mays
  Clone ID: MRT4577_99893C.1.pep
PIPDSHDPQRGNSTHTKITKFLFKGEILNLNLPDIPLKKTKKHPKTLGPYSPPKVPLQMETPTSLQTRLSFKPCP

SEQ ID NO: 369208 - protein, 193 aa, Zea mays
  Clone ID: MRT4577_99894C.1.pep
MSISPTESTRGSHPPAPRASNPSPSPRHGTASRRGSRSSPRASAAAPGVGRDGASTDSVGFIGQSVDTSQASQVVGFRISGEEDDPYAQEVSDVSECQSSGQGSLGLTVHSGGSVQADVQRLELVGSLEIDHSSDGLQGNGALLASRKNQAVNANYLLNFQYDPISRPQPRGPRTYPPRRQRKIKPYNKDLFL

SEQ ID NO: 369209 - protein, 51 aa, Zea mays
  Clone ID: MRT4577_99895C.1.pep
LVRDHVCESFFLVLNYKLYYLVACAWLWVETPVSVCVLDFSRARVGRNYFW

SEQ ID NO: 369210 - protein, 94 aa, Zea mays
  unsure (1)..(94): unsure at all Xaa locations
  Clone ID: MRT4577_99896C.1.pep
MACTAAYLARGPSQREPVRLLXDMTLNDTLNXAVYWHLFYKHVSNLIIKDQDDIDVDNLYFVDKLIAYADTKHMHLKSRDIYNTTWAPCITKFT

SEQ ID NO: 369211 - protein, 47 aa, Zea mays
  Clone ID: MRT4577_99897C.1.pep
AHVRTCRDPKFLNSVTLSGLRHSLCGYRTSRLECQTVHAICHINVDQ

SEQ ID NO: 369212 - protein, 39 aa, Zea mays
  Clone ID: MRT4577_99898C.1.pep
RGARTRHIAIIRGTILSAERSIALREGSYLLTLRNSRTA

SEQ ID NO: 369213 - protein, 78 aa, Zea mays
  Clone ID: MRT4577_99899C.1.pep
HRRKTQVSPQRMPLTGCSNSLSMMSSSSTVDVYSCRRRVVGVVGANPSWRSSSPNTPRCCLFAAALHASYLAFLYLSR

SEQ ID NO: 369214 - protein, 142 aa, Zea mays
  Clone ID: MRT4577_9989C.1.pep
KLFFFFFFFFFLFFFFFFFFFFFFFFFFFFFFFFYRKKQQGLASLRGGPPLMPKKLGALPLKTMPGMIPQMKTPNMMSPLMIPSMMSPMVLPSMMSQMKMPQCHWDPLSQIMLQQQLPFMFNPRAMTIPPMFLQKPFGGAAF

SEQ ID NO: 369215 - protein, 73 aa, Zea mays
  Clone ID: MRT4577_998C.1.pep
ISAQLRSGTPASVHVSWCECVSCSQVPFCVMQLLECTIAAVIFVRAAQSRSLRAAQSRSLYLVHFWSAATTCY

SEQ ID NO: 369216 - protein, 84 aa, Zea mays
  unsure (1)..(84): unsure at all Xaa locations
  Clone ID: MRT4577_99900C.1.pep
NRLKLLKMQGKFNTAKMELSKIAXIXAKEGKDAKLIEKETKMMETYSTPLNQDTSGMTDDMKVEHVAALKCFRHKLPQIYLKML

SEQ ID NO: 369217 - protein, 73 aa, Zea mays
  Clone ID: MRT4577_99901C.1.pep
TTRKPRGGGKPITNPSFPGQTWAHQRTVFCPLTKPEKWCQGGNKPPQTGGFEKNSSWKHPLGGGYKNGGVFFY

SEQ ID NO: 369218 - protein, 54 aa, Zea mays
  Clone ID: MRT4577_99902C.1.pep
IIINKYITCLQGFQYTGSAAAKIIASLIITAAIIHLLAFWEKMTLDQHIMKLQT

SEQ ID NO: 369219 - protein, 48 aa, Zea mays
  Clone ID: MRT4577_99903C.1.pep
NPNTHETEQASAMARRDPAPPHGEAERDDRSSSGIFACDCGGSHVIFN

SEQ ID NO: 369220 - protein, 77 aa, Zea mays
  unsure (1)..(77): unsure at all Xaa locations
  Clone ID: MRT4577_99904C.1.pep
PRSRGRVGGREMDGLPLDGCDYTCILGQCCKLPVGFVQLPVGRGGPFILRARRLXTRIGPTVGCTTASTNRSRFVMA

SEQ ID NO: 369221 - protein, 55 aa, Zea mays
  Clone ID: MRT4577_99905C.1.pep
AKKRGWPGPGLPEGTPGETRKIPAWSRPWLNQAPHGCPGDLKPVFSVKPGPPRGF

SEQ ID NO: 369222 - protein, 57 aa, Zea mays
  Clone ID: MRT4577_99906C.1.pep
DFPSKYVTAYGDVRKSENADEGPRKELSFMLNGPPPLKSVQPKVGSIDRKSTAHRTE

SEQ ID NO: 369223 - protein, 47 aa, Zea mays
  Clone ID: MRT4577_99907C.1.pep
LVGPLGFARRAPLLVKNSPLTCSKQSPIRMELGRWGGLIPRSLSRYG

SEQ ID NO: 369224 - protein, 139 aa, Zea mays
  unsure (1)..(139): unsure at all Xaa locations
  Clone ID: MRT4577_99908C.1.pep
RSEPETTNQKRGPSRTHKAGQDNPGGGGKPPRPSPXPTRKEGQKXQTLDPQGGSQTLAPXPTPPRPKTPPHQGGNPXRAQQVAPGSIGPARGPYPPKGPTLGRNPPKRRGEPXGPTPKXGGKQTRNGGGPPTEQGAPPG

SEQ ID NO: 369225 - protein, 93 aa, Zea mays
  Clone ID: MRT4577_99909C.1.pep
RSVPRRPLVGRDCARATASRMATKLIIISSARSPLVEVDVGLLLLTTCLMLAATVSSASRPFKVSSEGDDGGAQHHTVEESPPVDYIHTEVVV

SEQ ID NO: 369226 - protein, 156 aa, Zea mays
  Clone ID: MRT4577_9990C.1.pep
MKIIFVFALLAIVACNASARFDALSQSYRQYQLQSHLLLQQQVLSPCSEFVRQQHSIVATPFWQPATFQLINNQVMQQQCCQQLRLVAQQSHYQAISSVQAIVQQLQLQQVGVVYFDQTQAQAQALLALNLPSICGIYPNYYIAPRSIPTVGGVWY

SEQ ID NO: 369227 - protein, 116 aa, Zea mays
  unsure (1)..(116): unsure at all Xaa locations
  Clone ID: MRT4577_99910C.1.pep
ATTSPHHVVPTSQLASLNSTAYXHHHQLLPYNQLAYVSPTAFLTQQQLLPFNLHAMPNAGTLLQMQQFPPPHQLALTNPAVFNQQPIIGGASFRSHMSYSSINLVFSYYVGALPRN

SEQ ID NO: 369228 - protein, 123 aa, Zea mays
  unsure (1)..(123): unsure at all Xaa locations
  Clone ID: MRT4577_99911C.1.pep
PLPKAGGAGPLFLCVCPPLALKRAFPCGGCLFLLRYPPPPDGVLPRAVFLGFVGFPFWPPFFFSRFLSRFLGPLGWRILVGWLPLRMVAFVVLGLGVLAKNRRYTPKNSPPGWVYXXGMXYLR

SEQ ID NO: 369229 - protein, 56 aa, Zea mays
  Clone ID: MRT4577_99912C.1.pep
TKYRSISKDQSSVCNTNLKLNNVQVTSIIIQKLLATKKIYRQPSITRKINFLTKKK

SEQ ID NO: 369230 - protein, 55 aa, Zea mays
  Clone ID: MRT4577_99913C.1.pep
VPFAHCRLMPLFRTAIYAVFSHIVYVGDRCHDVQGGLAWVTQDVFSYNTLVYSGL

SEQ ID NO: 369231 - protein, 62 aa, Zea mays
  Clone ID: MRT4577_99914C.1.pep
LHQKCLEHHNANKTNTVIQRLTIGHPEQTESAYEYDYEYYDDNEDDYVTHFEEGSHNEYVTS

SEQ ID NO: 369232 - protein, 125 aa, Zea mays
  Clone ID: MRT4577_99915C.1.pep
ADPFFLRTGIVSTKSDVYGFGVLLLEAVTGLPPASEAQNLTARILPRVRERGVAGLVDGRLGDGGLDEEEAASVAELAVECLAAQPGLRPSMAQVRAAIAEKAARSIAKAGYGHHIQLSKLLELT

SEQ ID NO: 369233 - protein, 209 aa, Zea mays
  unsure (1)..(209): unsure at all Xaa locations
  Clone ID: MRT4577_99916C.1.pep
GDIYFSSLMDEANNNLSLDDFSVLPEVNPSGNEHEPPIVQSTPLSRPNXKRTKNFSEQEDELLVTAWLNISINPVHGTNQTRGTFSKRVYEFFHNNKTFESSRIESSLLHRXGLIQENVNXFCGCVSNIEDRTQSGVTYQDKXMALFKSKDNKSFQFVHCWNILRNQPKWHEKHKQMEVIKQVPNKKLKSSMNSSMGNSTTIVADSREH

SEQ ID NO: 369234 - protein, 46 aa, Zea mays
  Clone ID: MRT4577_99917C.1.pep
LSVLTVCIEHSPINVRGNRLCKLHPSHSVYIPEFSNDSVKWRRNDA

SEQ ID NO: 369235 - protein, 38 aa, Zea mays
  Clone ID: MRT4577_99918C.1.pep
NRGASQDITRFYQQKTNTINHKLSAQSSMFWMNACIYY

SEQ ID NO: 369236 - protein, 274 aa, Zea mays
  Clone ID: MRT4577_99919C.1.pep
MDANEIRRSLIIKAVALAAATFYYILIVRRKMKRKRVSYAPMIDMEVKRNDYLSSIYHKDDTSCLRMLRLRRAPFFLLCDTLKQRGLLSDSIHCCVEEQVAMFLHTIGHNERNAVVGKNFKRSGETVSRYFKLVLRAIGELRDDLIRPPSLETSVKILGNPRWYPYFENCIGAIDGTHIRASVPKSREAAFRGRKSFTTQNVMAAVDFDLRFTYVLAGWEGSAHDAVVLADALQRQNGLVVPEGKYYLVDCGYGAKPGFLPPFRGVRYHLKRGV

SEQ ID NO: 369237 - protein, 48 aa, Zea mays
  Clone ID: MRT4577_9991C.1.pep
LQRRRSIGGCEHWDYLVHALSSDGICLNFPCVLVRYYTLRGQSNYKCR

SEQ ID NO: 369238 - protein, 120 aa, Zea mays
  Clone ID: MRT4577_99920C.1.pep
RSTLDQTYCIPFLQISGTRLFLRGVGFVILEVVFKEYIVFSLFDVPHLHHTENIHKIWSIIQTNVLKKNASCWSLYVYALNKIINRLIKVYSYSRIEVLTERVFKIGNLNSYSIASPKSN

SEQ ID NO: 369239 - protein, 269 aa, Zea mays
  Clone ID: MRT4577_99921C.1.pep
MDANEIRRSLIIKAVALAAATFYYILIVRRKMKRKRVSYAPMIDMEVKRNDYLSSIYHKDDTSCLRMLRLRRAPFFLLFDTLKQRGLLSDSIHYCVEEQVAMFLHTIGNNERNVVVGKNFKRSWETVSRYFKLVLRAMSELRDDLIRPPSLETSSKILGSPRWYPYFENCIGAIDGTHIRASVPKSREAAFRGRKSFTTQNVMVVVDFDLRFTYVLAGWEGSAHDAIILVDALQRQNGLVVPKGRWMMSKKLNKGPNHKSGHKKCLHVL

SEQ ID NO: 369240 - protein, 69 aa, Zea mays
  Clone ID: MRT4577_99922C.1.pep
EFENWLLLISMIECPTTAVAVGCCCIHALLLLAHSTIPTITLVLYVCSSSLQTAVTAVLVQPIRLNQVC

SEQ ID NO: 369241 - protein, 110 aa, Zea mays
  unsure (1)..(110): unsure at all Xaa locations
  Clone ID: MRT4577_99923C.1.pep
PSTPGSPPSFPPPPXQRAPPPXIPPPSSPPPPLXRFRRTPSFESAPXPSSIPPSFHVAPSFDGQPHPVIPPRXPLPRIQPPLPPADPPPASSPNVSLTHMPAAAPSRPQW

SEQ ID NO: 369242 - protein, 113 aa, Zea mays
  unsure (1)..(113): unsure at all Xaa locations
  Clone ID: MRT4577_99924C.1.pep
IKHVNGPIIINLIHVRVEHRLSYRWAXDFRLRKANNDHLKVDAKDHSEVIIINMHPVRPKPGFMAVGATLATVTPIPYDEVNDLNACLLHKIIFLEHFKRPVINTYLNLFDNC

SEQ ID NO: 369243 - protein, 84 aa, Zea mays
  Clone ID: MRT4577_99925C.1.pep
MDVLAEANGTFALNLLKTLGKDNSKNVFVSPMSMSCALAMVYMGAKGNTAAQMAQILSFNKSGGGGDIHQGFQSLLTEVNKTGT

SEQ ID NO: 369244 - protein, 150 aa, Zea mays
  unsure (1)..(150): unsure at all Xaa locations
  Clone ID: MRT4577_99926C.1.pep
MSCCGGICGCGSGCRCGPGCGGCCLMPPDMAGRVTXTTTQALIVGVAPSTGRGEGGFAAAAXAAIGGRVCGGCCQCDPCHCGKCAPCSSLQAGRMLATSQALYRLAAVPVRVSGSSACLLRALACSASALIAVPCWPASCPALAPWGAPG

SEQ ID NO: 369245 - protein, 94 aa, Zea mays
  unsure (1)..(94): unsure at all Xaa locations
  Clone ID: MRT4577_99928C.1.pep
RNPLVAWNKLKTPLGKFNXGPFFLGHSSLWTVPLVPFFKRFQILFSILKTFDVPKGKPTLKNFIGEVTKIVAYTQTNLDPQFLFDQTKNRLGIA

SEQ ID NO: 369246 - protein, 55 aa, Zea mays
  Clone ID: MRT4577_99929C.1.pep
FGYVTVVIDSLSECPGLHGCGTSQCRGNHIHVGVFKCKCISSLAVGPKHSPCFPP

SEQ ID NO: 369247 - protein, 77 aa, Zea mays
  Clone ID: MRT4577_9992C.1.pep
KTERAVHPTRLASTGKKKGPPHHKRAGFSLLAHIPKDQNFVAVSGFQQSGGPFFGAPPIWGGPGPTKPLGSSELLKT

SEQ ID NO: 369248 - protein, 110 aa, Zea mays
  unsure (1)..(110): unsure at all Xaa locations
  Clone ID: MRT4577_99930C.1.pep
AHTLTLNNSERLYLHKMDQAAEXXLPCYVALQVDRTLSSNDVNWSLTITTLPILVNGVLTVEDTMLAFANGAVNIMLSNHCPRNVEYVPETIKPLEDDGKASRRQLPVIV

SEQ ID NO: 369249 - protein, 56 aa, Zea mays
  Clone ID: MRT4577_99931C.1.pep
SCGAIDKTAAFTAKMPSSCKELREALAQCLQESECVMAADYSAAPFLHIPIPPPLP

SEQ ID NO: 369250 - protein, 56 aa, Zea mays
  Clone ID: MRT4577_99932C.1.pep
GTKNFPYWFLQNPNLDALLPMQGWLLLKKIVKPKAGNDLPFPPNKFNKNFLFAREN

SEQ ID NO: 369251 - protein, 106 aa, Zea mays
  Clone ID: MRT4577_99933C.1.pep
MIPFTRGVLANLSASRTSPSDYRHGRRRQQPRGVKPPYPNCGCRTRGREAPEGYSAGGIQLLCRPDTGRDGTARVGPLLRRSTAGELRLHEPLLPGSQRQDLQHRL

SEQ ID NO: 369252 - protein, 53 aa, Zea mays
  Clone ID: MRT4577_99934C.1.pep
ATILLQCVTSAVVIAASVLDPVIQPPKCGEHFVCTGCVHSMRLKLSNAYVVTE

SEQ ID NO: 369253 - protein, 120 aa, Zea mays
  Clone ID: MRT4577_99935C.1.pep
SRRSPRVWAVLLRSLRSIPASSFCGRPGSVRSHVQRPFRCSHHQVILGVLGGVVATGCRVGGNRSEHPLAKSTQCRPRPGGRSQRSSGARRRRRTRGGGQSAPCGKGCEDAGADVAATPE

SEQ ID NO: 369254 - protein, 242 aa, Zea mays
  unsure (1)..(242): unsure at all Xaa locations
  Clone ID: MRT4577_99936C.1.pep
DWVPRGRPGRHDSSGSTQETATDDGVRGSPGTSFKIPDGEIFFLHAAGVDVSGGIGIGEGGAGAVPFSSVIARADDAADVLLGPKLKRLNSFQDAAKHIKVLFRWPRRGWKKSGSGGRKGLDDDDASSVDSAKTWSHEETPTPLRQRYSRIGSLFNKRTYAAGRASPSEAVKKGGVVQPAGSTLLSTSLSSSSASASLVDRIESVHQDNDQSPYVSRLIRHTPKKSGSXHSRLMNQSLRLRA

SEQ ID NO: 369255 - protein, 121 aa, Zea mays
  Clone ID: MRT4577_99937C.1.pep
PPFSGINLPSASRCPLLCPSPQSPTCSPPCLSPSTSCPHCPPLPPSKPPLSLFTMFPSPLSSHIIIFSPSVVFSFSPPNAPSSMFRLSNPFLLPHSLKVYFFSIVPICLCSPLVPAPLLPN

SEQ ID NO: 369256 - protein, 304 aa, Zea mays
  unsure (1)..(304): unsure at all Xaa locations
  Clone ID: MRT4577_99938C.1.pep
DGEFRREMMNRAVHAAARGGSLAVLRDLLRGCSDAAAYRDAQGSTILHAAAAKGQVEVVKDLIASFEAGNCVDDQGDTALHIAAFRGHVQVVEALITASPSLISATNEAGDTFLHMALTGFGTPEFQRLDRQTELIRQLASGAIVDISSSSTIINAQNDDGKTALHLAVVCNLHSDVVKLLMSLPCIDLNICDKDGMTPLDLLRKQPRTTASEVLIKQLILAGGFTSSRDHETRSAIASQLKMHSIVGSPGTSFKIPDGEIFXSTLLESTCRAASASAKEELEQYRFPPLLLGLMPLTSCWDPN

SEQ ID NO: 369257 - protein, 51 aa, Zea mays
  Clone ID: MRT4577_99939C.1.pep
STLENDLLLEVHRRSDEISLQFCLKDQRNNASYFHICGGEQTGNGSMTAGF

SEQ ID NO: 369258 - protein, 117 aa, Zea mays
  Clone ID: MRT4577_9993C.1.pep
SASIGRPPPPPPGLRWARRRRQAPTRKRKKIKELQDNVVAVNFTPSNKLGKMLMAKCRTLQEENEDIGVMASKGKACVLPAPRRSFCGNYARVVNQILQGLTNMHLWIRLPLEKSKP

SEQ ID NO: 369259 - protein, 98 aa, Zea mays
  Clone ID: MRT4577_99940C.1.pep
HVRVKHMQGWRLSLLPSRQFGHTVIPISVEIMFHEQAPRNTCWCQGFRFLLLKMCFSQPHMRSTARAMFRGLLRLRVRSHCGLLSHRMRHVFQRLGLL

SEQ ID NO: 369260 - protein, 336 aa, Zea mays
  Clone ID: MRT4577_99941C.1.pep
FRGDSLGKIFVGGVAWETTEESFSKHFEKYGAITDSVIMKDKHTKMPRGFGFVTFSDPSVIDKVLEDDHVIDGRTVEVKRTVPREEMITKDGPKTRKIFIGGLPPSLTEDELKDHFSSYGNVVEHQIMLDHSTGRSRGFGFVTFESEDSVERVISEGRMRDLGGKQVEIKKAEPKKHGSDHSSNGRSNHGGGAYRNSYRSGGGAGSGSSGGGGGYGYGGAYRSAAAGYGYDGGAGAGYGYGRGYGYGGNAGFGSSFGGGYGGSMYGGAAYGAYGAYGGGAYGGGAYGGGAYGGGAAYGGAPGGYGTGGYGSYGGAGSTGGGSTGARGSSRYHPYGK

SEQ ID NO: 369261 - protein, 64 aa, Zea mays
  Clone ID: MRT4577_99942C.1.pep
FGSRLDSRIIWPLSDQEDGAIIWQRCCMPHMTTSARGELTYARSNALQPGSHWNQSMQPEGCFI

SEQ ID NO: 369262 - protein, 43 aa, Zea mays
  Clone ID: MRT4577_99943C.1.pep
IPRFINFRTSREDNSRFNVIFYSIQLELLSFLLMSGAIILPNL

SEQ ID NO: 369263 - protein, 350 aa, Zea mays
  unsure (1)..(350): unsure at all Xaa locations
  Clone ID: MRT4577_99944C.1.pep
MAGYPEDNQHELNGYDEEVDEEEGHPGRRVGRDGGSGYADAVGEDGRGAGGDSLGKIFVGGVAWETTEESFSKHFEKYGAITDSVIMKDKHTKMPRGFGFVTFSDPSVIDKVLEDDHVIDGRTVEVKRTVPREEMITKDGPKTRKIFIGGLPPSLTEDDLKDHFSSYGNVVEHQIMLDHSTGRSRXGFGFVTFESEDSVERVISEGRMXDVLRLVPVLQEFGTREAAXVMGMVXYRSAAAGYGYDGGAGAGYGYGRGYGYGGNAGFGXXXXXXXXXXMYGGAAYGAYGAYGGGAYGGGAYGGGAYGGGAAYGGAPGGYGTGGYGSYGGAGSTGGGSTGARGSSRYHPYGK

SEQ ID NO: 369264 - protein, 83 aa, Zea mays
  Clone ID: MRT4577_99945C.1.pep
PPSPIPTIDFFFSSSTNPHTGQLQIKKSPYPLHYTNLTYTSQISTQQSHSPPDKHYNLLLKPNHLQHPKTPSKYQPPNHISVT

SEQ ID NO: 369265 - protein, 75 aa, Zea mays
  Clone ID: MRT4577_99946C.1.pep
NKPLMHWKLGQNTTRWFNTLLTNNVSVKNTLPCLVSRGREKTQLIISGCHIHELEMLYFFLSVCVPADLQIQTEN

SEQ ID NO: 369266 - protein, 103 aa, Zea mays
  Clone ID: MRT4577_99947C.1.pep
NCGHPIPRGRPSTNGYAQIGSHPSDGDPIDPGHLQHPTVANGGASVLTRQRHCRSSTTTRFCRPRWQHHRRTPPNPPSTRTKSSMLNAMLGTRRTPSTMSYRR

SEQ ID NO: 369267 - protein, 65 aa, Zea mays
  Clone ID: MRT4577_99948C.1.pep
SVHGMKMSPFGKGENEMACFSQCPVGVFVRGSAAIGHIRLKHCFRLLRSACFAPQVWVKRSGCLF

SEQ ID NO: 369268 - protein, 69 aa, Zea mays
  unsure (1)..(69): unsure at all Xaa locations
  Clone ID: MRT4577_99949C.1.pep
PRSVXXCPHRACSCVSRFTRNHXHPDPFLRWPHSCPEPGPAXNGRLTELFXHPGPPGGFGHALRPARSY

SEQ ID NO: 369269 - protein, 146 aa, Zea mays
  unsure (1)..(146): unsure at all Xaa locations
  Clone ID: MRT4577_9994C.1.pep
MLLSPSLSLRRTESPIPILIDTSTIRAPHRCLRCSCVQCNXTTDHVENIVKTLIDYSDPPSNVVDCVVNPPFDFLHALNSHLLLHLHVADNNCWLVEXGAFPVVPLAEMLDTLVVPCYILGHSDKRVLLIDSNEFAKHLDAYALFH

SEQ ID NO: 369270 - protein, 134 aa, Zea mays
  unsure (1)..(134): unsure at all Xaa locations
  Clone ID: MRT4577_99950C.1.pep
MGKDKEAANLKEEETEIKAKFVEKEEAKDSGGGAGSVGGKSKEGKKDRERKEEEKSVEHEYGEGDEKAIKKKDGSELKXSSGEKQEKIKDKKETGDGKDVGEEEKRKKIGKQDQDKKDKKAKEKDVSGTKGWQG

SEQ ID NO: 369271 - protein, 93 aa, Zea mays
  Clone ID: MRT4577_99951C.1.pep
LKLLVDHQLNAVFSNTLLPNKYHHVIFFFFFPPLSNTIPHPDTHCRTERRQWGESSSGLCAAAVLVASSRRRTVASSRLRSRGSTEGSRPASR

SEQ ID NO: 369272 - protein, 102 aa, Zea mays
  Clone ID: MRT4577_99952C.1.pep
MVGGTGTTGTCRRHRSLCRADSLVEKNTCKINCHGGLIRFKMGKDKEAANLKEEETEIKAKFVEKEGAKDSAGGARSVRGKSKEGNKDRERKDEEKPVEHEY

SEQ ID NO: 369273 - protein, 241 aa, Zea mays
  Clone ID: MRT4577_99953C.1.pep
RGEERQRGKGGGKSVEHEYGEGDEKAIKKKDKKEKDKKKKEDDGDSGKAEKDKKDKKAKEKDGSELKGSSGEKQEKIKDKKETGDGKDVGEEEKRKKIGNKDKDKKDKKAKEKDGSEPKGDKDEDGKKKEADGDEDEEGKKEDKEKKEKKRKHKGAKEKTIDPVKLKAKLEKIDAKLHDLQAKREDILRQLKELEEGGKGNANEEEPAHVQEDKGKDVVPAQILEQVGESKVEEQNPVATA

SEQ ID NO: 369274 - protein, 479 aa, Zea mays
  Clone ID: MRT4577_99954C.1.pep
MRESPSTQGGPSTSSAVDDSYSADGVEDSQLFLSVPALNQAASYLAQTASFLTQCLPVPGFVGLSEEGQELLTLPPASASGRLSVQTSSVEPSGTNSSLGQSDCGGNPSQENAGQMVPSHVFQNGASLFQGLVERARKTVRGSADDIGWLQRDQSLPTTEDGTARFLEILDSVRKNEHKLSDSLVYLLVPGLFSNHGPLYFVKTKAYFSKMGLACHIAKIHSESSVSKNAREIKEYIEEIYWGSRKRVLLLGHSKGGVDAAAALSLYWPQLKDKVAGLALAQSPYGGSPVASDILREGQLGDYVRLRKIMEILVSKVLKGDLQALEDLTYERRKEFLRRHPLPQDVPIVSFHTEASITPSVLTALSHVAHLELPIAGDGNSTRIPVVMPLSAAMAACSQLLVARYGEKSDGLVTRKDAEVPGSVAVRPERKLDHAWMVYSSLKEESGDQADTSQVCEALLTLLVEVAQKRRHEMAMKDE

SEQ ID NO: 369275 - protein, 109 aa, Zea mays
  Clone ID: MRT4577_99955C.1.pep
GPQPWSGGPQVCTFTLGHEGARPLGARPPGWSTGVGNPPKEGFPGTQPPPFLILGPPPKFLAGGEPVSTPGFNPHLAPGKTPPLKFYFGLGGQGPRFLTKFLMGGPPAL

SEQ ID NO: 369276 - protein, 151 aa, Zea mays
  Clone ID: MRT4577_99956C.1.pep
LLSKHGSQGGFVKDLNSRQDLSKNLPAQRIGKDVSSPLFAWSPAESRTASSQQEGSCLSSTTNPSFLDELHSSIASAKPKSCAPATPVEDRGSSSPSDMLSHEERVPICSPQSAPLASASDMCKMEEIMNQQRTLVVDTSNASVNQSPDSN

SEQ ID NO: 369277 - protein, 70 aa, Zea mays
  Clone ID: MRT4577_99957C.1.pep
PHVHGRRITEDMTVIASDDPSVVAMAATWLRIHVLISLDASFASACRAYPRKGKRPAGLGCREASVEKIF

SEQ ID NO: 369278 - protein, 33 aa, Zea mays
  Clone ID: MRT4577_99958C.1.pep
QLHPGMNRAMLGFQQDCSTRINLQRRLYLRLLY

SEQ ID NO: 369279 - protein, 46 aa, Zea mays
  Clone ID: MRT4577_99959C.1.pep
NNRRHTIHTLFPITFFLHQILYNMPNSILHILVQQITHPEQPIIID

SEQ ID NO: 369280 - protein, 93 aa, Zea mays
  Clone ID: MRT4577_9995C.1.pep
VRSPDSKSAELAYLAHFPALISGKTVTISLWNDLATRTGQELLDMVDRSPVVAIKSLKVSDFQVLSLSTIGRSTLEINPDLPEAKNLKSWHDS

SEQ ID NO: 369281 - protein, 64 aa, Zea mays
  Clone ID: MRT4577_99960C.1.pep
SEEKLRPSAGPAAASVISYGAGRSPQAHATDSYIRFMQLSRMEVSLKSGPLPTMQLQLTGLLLV

SEQ ID NO: 369282 - protein, 83 aa, Zea mays
  Clone ID: MRT4577_99961C.1.pep
RRQRPSERPLARDGSALSSNHETSKRAYRTYVDAERARAMRRDEMHAFNTVHSIPVCAVRRAPLSPSLTVCRSLAYPCSIPSH

SEQ ID NO: 369283 - protein, 150 aa, Zea mays
  Clone ID: MRT4577_99962C.1.pep
GPSPFCHFPGPKGTTPGGPFPAAFLCAMAGSLNELAPQVFPFPTGQLGPAHLFVLAPPFGPPGFPLFFSARLLGEFFSANLFPQAPFFPVFPPSSYRTPFRATWAAPRFPAQSPGLPPGSLKKKKKKKHKKKKKKKKKKKKKKKKKQGRP

SEQ ID NO: 369284 - protein, 238 aa, Zea mays
  unsure (1)..(238): unsure at all Xaa locations
  Clone ID: MRT4577_99963C.1.pep
FHGPSVQAKMARVLLLVVLAASLAALASSKGLPVLAPVTKDTATSLYTIPFHDGANLVLDIAGPLVWSTCDGGQPPAEISCSSPTCLLANAYPAPGCPAPSCGSDRHHKPCTAYPYNPVTGACAAGSLFHTRFEANTTDGNKPVSEVNVRVLAACAPSKLLASLPRGSTGVAGLGGSGLALPAQVASAQKVANKFLLCLPTGGPGVAIFGGXGPLPLPQFTQSMDYTPLVGKGGQPLG

SEQ ID NO: 369285 - protein, 101 aa, Zea mays
  Clone ID: MRT4577_99964C.1.pep
YHSSLPGSRLFFSASRTKRARDDAQGRRTPEADYASRLLPTCRSANLIRTAGTSTTSSSPDTFERSVDVGVYLEGRDAVPIHNQFVSDEDHDWGKDRALGA

SEQ ID NO: 369286 - protein, 67 aa, Zea mays
  Clone ID: MRT4577_99965C.1.pep
PVASCEVVSSVSKFSVCRNTIDMLQFRASNVCNLLRVCCISMSDTSGFSGVHKLCGMSDTIEGHLFA

SEQ ID NO: 369287 - protein, 60 aa, Zea mays
  Clone ID: MRT4577_99966C.1.pep
AGFRLVSSSTRQLVPCRCLQVYTRSLYCRVLELGNVETRGVSSVSLLEANFTLQYARLGL

SEQ ID NO: 369288 - protein, 126 aa, Zea mays
  unsure (1)..(126): unsure at all Xaa locations
  Clone ID: MRT4577_99967C.1.pep
SSESAKQEAKILPVPNGKFRGKLCGASTSKVQVGDNTAGVPKKTTPLEIKSTPKXPAXGSIKGTVGVXEEDLFSPTSQKDTGXPIXESKVGKALXGXLVKIASWATKDWGISSRVVAVTRHIISSM

SEQ ID NO: 369289 - protein, 80 aa, Zea mays
  Clone ID: MRT4577_99968C.1.pep
HLHRQMSKERLPPPNRAAWTVVSASSGAGAGRRGVTFSTVARGREAWSYRLHRPTASPSISSPACQSSPTTLSCTIPTPA

SEQ ID NO: 369290 - protein, 162 aa, Zea mays
  unsure (1)..(162): unsure at all Xaa locations
  Clone ID: MRT4577_99969C.1.pep
MLPSCGRPPRKAPNRRCPAQKQTARPLTRGQARRTQLPTMALRRCAPGTGSAYKPHWCAAEIVAQGEIHKCHNSTGXLIHLQPLHRVDRQTXHDLRSXVRFLTYVVFAPYEAGSAYLVALFGDTTRCAIXHAMRGTITLNDLHFARRMRGERASTTPAPLIG

SEQ ID NO: 369291 - protein, 49 aa, Zea mays
  Clone ID: MRT4577_9996C.1.pep
SQGPPHNYFVLLKGGYAPPLYFFKKVFRPPRVFVLGPSHNMTNKLLYKY

SEQ ID NO: 369292 - protein, 301 aa, Zea mays
  Clone ID: MRT4577_99970C.1.pep
RGRYKDGSAARGTVGTDSATIALSGRRAGKKQRQAQAKLQGVVLGCTTSYDGESFLASDGVLSLGYSNVSFASRAAARFGGRFSYCLVDHLAPRNATSYLTFGPNPAVSSASETACGGSGSGSAAPGARQTPLLLDRRMRPFYAVAVNGVSVDGELLRIPRRVWDVEKGGGAILDSGTSLTVLVSPAYRAVVAALSRKLAGLPRVAMDPFDYCYNWTSPSTGEDLAVAVPELALHFAGSARLQPPAKSYVIDAAPGVKCIGVQEGACPRVSVIGNILQQEHLWEFDLRDRWLRFKHTRCAL

SEQ ID NO: 369293 - protein, 59 aa, Zea mays
  Clone ID: MRT4577_99971C.1.pep
SSSQLCSGVGKCVLVSPGWPLKHSTIVMAVYSAHLLTKGPPTCNGAPTGNKPRRALEPN

SEQ ID NO: 369294 - protein, 96 aa, Zea mays
  Clone ID: MRT4577_99972C.1.pep
MPAAGLRRAGGRFPLARDVGSSGANERSSSVRRGFGGGVAMPRALLEDSAPAMDAPATTGREPPPPASAAASRVTPAVLFVTVVLAVVLLVSGLLH

SEQ ID NO: 369295 - protein, 121 aa, Zea mays
  Clone ID: MRT4577_99973C.1.pep
IAVICVMVAKAKANQMEERRNDDGTLVEPVITISGLGRLPNTLTCTCGFLLHGVAHINSLCLPVCTKQRRKQSIQHGQCRKSNDEVADDEHKKKGGRQRGQKSGYCKSKDGAGAIKVKSPK

SEQ ID NO: 369296 - protein, 94 aa, Zea mays
  Clone ID: MRT4577_99974C.1.pep
GWGAGINSLFASRPHRSDNHAYSTGAHDDVLPVRPIELVTAAAEITRELGRSIVSTITCHLSEPRVSVTAEMKRSREGYPLTPVANTTRKRGNY

SEQ ID NO: 369297 - protein, 100 aa, Zea mays
  Clone ID: MRT4577_99975C.1.pep
RTRGPKMVLLVHLHKKLHALAPPFLLLRLRPQQPNTRPPGVPHYKSSTFIAPIAIGYGFLCVSSKWYWIFSVFGLQQTLSCDFAPLMNLCLMPECGTTLS

SEQ ID NO: 369298 - protein, 93 aa, Zea mays
  Clone ID: MRT4577_99976C.1.pep
CSLAVGRLHVAMHGVSRPIWVACTNNPTRWRRLLVRQGPARTGLSPSQASLSIQIGCGRSVSKPVYTTIRSARPPDSLARLLAVRSLSVGKSL

SEQ ID NO: 369299 - protein, 69 aa, Zea mays
  Clone ID: MRT4577_99977C.1.pep
MQFHSLYSNHCKEIVMPNELGYVNFLVVHIRCRVISVGVSYPVKTPFHIKSLPNFTFFGRIRLEATVNN

SEQ ID NO: 369300 - protein, 157 aa, Zea mays
  unsure (1)..(157): unsure at all Xaa locations
  Clone ID: MRT4577_99978C.1.pep
LTRACVRLPILYRELTTINWPAVDNTTDWQNPAWTHLTHLAXHTSFVSGRACYXAGTDRSSXQTRTLTGWWDAPSLGPFITGGVGGAHTQTDPFASHLPTARFFFFLSFLSSLVGFPCQALSKWLALWMRSXCLTXLPPTQLTWGDGSRTEPSICLT

SEQ ID NO: 369301 - protein, 91 aa, Zea mays
  unsure (1)..(91): unsure at all Xaa locations
  Clone ID: MRT4577_99979C.1.pep
SAEIIAETVNKAGAVDTAGRAAEDSKDESEFHRRTATEITEKAAVNPGVLDTDVCSEESSTDGTPHXLKSRXSDDVXATSNGPGVAANVSG

SEQ ID NO: 369302 - protein, 51 aa, Zea mays
  unsure (1)..(51): unsure at all Xaa locations
  Clone ID: MRT4577_9997C.1.pep
MMECITVHIGQAGILVXNAYCELYCLQHSIHAVGHMPGDKTIVGGDVTFNI

SEQ ID NO: 369303 - protein, 165 aa, Zea mays
  unsure (1)..(165): unsure at all Xaa locations
  Clone ID: MRT4577_99980C.1.pep
YKRGISWEDEREHIFGKQVFPRNFQKGALIGGGTLDPRIPXVYYSTSGTLLLYWGKKTGLCDEVEIPQLSEQEDLIVWMRTAALPTFRKLYGRIEADLRAGELVTVTTQNNYNTYSFGGKKALVLSTAGVLGGRNGFLGRGYAVVGLACLLLALLLTMLCLVFPL

SEQ ID NO: 369304 - protein, 62 aa, Zea mays
  unsure (1)..(62): unsure at all Xaa locations
  Clone ID: MRT4577_99981C.1.pep
VSEVTVXCISVLKNVSLPVSGGVVWLLVVRVRGAMMAVSFDSLHDPGVSELVTLGETTCSYY

SEQ ID NO: 369305 - protein, 222 aa, Zea mays
  unsure (1)..(222): unsure at all Xaa locations
  Clone ID: MRT4577_99982C.1.pep
MTVEGRVSGGGDGGGGKDKFPAGMRVLAVDDDPTCLKVLENLLRRCDYHVTTTGQAATALRMLRENKDQFDLVISDVHMPDMDGFKLLELVGLEMDLPVIMLSANGETQTVMKGITHGACDYLLKPVRLEQLKTIWQHVIRRNTKNRGSDNDDAGQKGPNAEGENGGANRNKRQSRRDRDDNGDDGDDSDENSNDNGDSSSQKKPXRVVWSVELHRKFVAAV

SEQ ID NO: 369306 - protein, 87 aa, Zea mays
  Clone ID: MRT4577_99983C.1.pep
MDWGNRTKAAAAAAAPDERAGGGEGLGGYVKVMTDEQMEVLRKQISIYATICEQLVEMHRVLTEHQDTIAGWAAQLHAKPIATLSAL

SEQ ID NO: 369307 - protein, 106 aa, Zea mays
  Clone ID: MRT4577_99984C.1.pep
CARPSTSQYQLWCRSRGGPPACPARRHTCVRAGPQATPLFTAKAATGVCLTPPPVGRAAACGRPSPRGTCHGPKGCVISHRGQGWRPSLPLWPSGRRVGGPRPAPP

SEQ ID NO: 369308 - protein, 259 aa, Zea mays
  Clone ID: MRT4577_99985C.1.pep
NETAEHRRLAEIIEMIHTASLIHDDVIDDSGMRRGKETIHQLYGTRVAVLAGDFMFAQSSRFLANLENIEVIKLISQVIKDFASGEIKQASTLFDCDITLDDYLLKSYYKTASLIAASTKSASIFSGVSTTICEKMYAYGRNLGLSFQVVDDILDFTQSAEQLGKPAASDLAKGNLTAPVIFALQSEPELREIIDSEFSDTDSLATAIELVHRSGGIRRAHELAREKGDLAIQNLQCLPRSDFRSSLEKMVEYNLERIE

SEQ ID NO: 369309 - protein, 72 aa, Zea mays
  Clone ID: MRT4577_99986C.1.pep
MPGNPWGPAKYLFAQFLYKAPPPRSKNPIFTPPRGFFFKKKKKKKKKKKKKKKKKKKKKKKKKKKKKKKKNP

SEQ ID NO: 369310 - protein, 98 aa, Zea mays
  Clone ID: MRT4577_99987C.1.pep
AGLVQRIDWANPAVTPTLMALQRTPPSPGGVLSTRGDPLATSNIKTSCNGQRTAPCSHSLRTSLSRLYTKCPIHRPAPYLPLHDHGHLCCSRLSHGAT

SEQ ID NO: 369311 - protein, 124 aa, Zea mays
  unsure (1)..(124): unsure at all Xaa locations
  Clone ID: MRT4577_99988C.1.pep
RGPGTQSPRLMMHDTWMLLSSATXLCGALIPIVLLIIKYQKNKEFFSLKKXKNVIHKTLVRREIDMQYXRAISNTYHPVFPIYYIFQLTERWESGCYRVFSLWFTVYTVSILCGAGCPIEAWGS

SEQ ID NO: 369312 - protein, 93 aa, Zea mays
  Clone ID: MRT4577_99989C.1.pep
VYCMQPSEQCSSGSFYKDPSVFLNDTYHLRSCKCLDQCACPYWHAARTLRNRSLCSRIPHKAWLLGGHPNLPGSACAVRSYRPHPTLALMCLA

SEQ ID NO: 369313 - protein, 43 aa, Zea mays
  Clone ID: MRT4577_9998C.1.pep
QRQGHIASDTQVTLCIHSTQLMHYSAGPGLTRQKGVLVSKQKL

SEQ ID NO: 369314 - protein, 81 aa, Zea mays
  unsure (1)..(81): unsure at all Xaa locations
  Clone ID: MRT4577_99990C.1.pep
TNYQPCFHRSNFNKIKKGISPFFKLSHILQYPQNQLLHTSTPGNSLQSISLFSLLFYPNYFFXCCVXXXXVGGGGVRCKFS

SEQ ID NO: 369315 - protein, 98 aa, Zea mays
  Clone ID: MRT4577_99991C.1.pep
GLAKAADKLLPHHHHNHHHHHHYSDNNNTTITEHVEVDVVRHDANSSSRRPAPATESQPNTVSIPCHHIRLGDFLMLQGRPCQVIRISTSSATGQYRY

SEQ ID NO: 369316 - protein, 46 aa, Zea mays
  Clone ID: MRT4577_99992C.1.pep
MLHCTYTSLIHAGVRVQLPEGTHPLEYFTRHGSSCFVMLNRSLDKD

SEQ ID NO: 369317 - protein, 79 aa, Zea mays
  Clone ID: MRT4577_99993C.1.pep
LIVIDNQRDNCPTYIYNQLVHRLLGGQMIGYAYICQRKIVEPYYKKKPEQGFIPPQMVGGDYELTNAGRPYYPFSPGGQ

SEQ ID NO: 369318 - protein, 173 aa, Zea mays
  Clone ID: MRT4577_99995C.1.pep
STISSFYTLLLEITSSRACFYSHFILSRGCAQQKTSTKSLVLLAPRNELATKAARKSAPATGGVKKPHRFRPGTVALREIRKYQKSTELLIRKLPFQRLVREIAQDFKTDLRFQSSAVAALQEASEAYLVGLFEDTNLCAIHAKRVTIMPKDIQLARRIRGERAYAVLSVHVE

SEQ ID NO: 369319 - protein, 136 aa, Zea mays; identical to SEQ ID NO: 223526
  Clone ID: MRT4577_99996C.1.pep

SEQ ID NO: 369320 - protein, 136 aa, Zea mays; identical to SEQ ID NO: 223526
  Clone ID: MRT4577_99997C.1.pep

SEQ ID NO: 369321 - protein, 127 aa, Zea mays
  unsure (1)..(127): unsure at all Xaa locations
  Clone ID: MRT4577_99998C.1.pep
ALGFDGGLEKPPTDALRPIIPDNACILCLPGAGGTEKAAAYSCRTGAVFSPKKKVDDPXAFHLHAELFRQAFAHWGKFPTAASRRSLGRVXVPGGVIILSDQLLIIALVSYCLTNYLIRREPLLGGI

SEQ ID NO: 369322 - protein, 136 aa, Zea mays; identical to SEQ ID NO: 223526
  Clone ID: MRT4577_99999C.1.pep

SEQ ID NO: 369323 - protein, 50 aa, Zea mays
  Clone ID: MRT4577_9999C.1.pep
QEQKWPPKPKSVSHSARSSVRSRNRRKTWPPGNPSLEQRPSSVSAPWATT

SEQ ID NO: 369324 - protein, 66 aa, Zea mays
  Clone ID: MRT4577_999C.1.pep
FPLQGLLPGLGLLALRPDELPVQGGGQHDGQPHGGGGVVRLLLGIIATRFIKPSASYSCTRRPSSL

SEQ ID NO: 369325 - protein, 62 aa, Zea mays
  Clone ID: MRT4577_99C.1.pep
FCLLKRASQLCCVTAMVWPSGLKIVNSAHFWACTRFILCNFVRQGFDTRITMSSHCHDNSSI

SEQ ID NO: 369326 - protein, 84 aa, Zea mays
  Clone ID: MRT4577_9C.1.pep
FRCFLLPQSSRFLIFPPKGKGGGPSSWVSPASLNKAPFPDWALFVGVCAPAFFRKRPPGWWAELPWPWAPPPPDKHGPGVVVGP
